(19) United States
(12) Patent Application Publication
(10) Pub. No.: US 2026/0193605 A1
(43) Pub. Date: Jul. 9, 2026

(54) RAPID AND DETERMINISTIC GENERATION OF MICROGLIA FROM HUMAN PLURIPOTENT STEM CELLS

(71) Applicant: Westfälische Wilhelms-Universität Münster, Munster (DE)

(72) Inventors: Matthias Pawlowski, Munster (DE); Anna Martina Speicher, Osnabrock (DE)

(21) Appl. No.: 19/343,745

(22) Filed: Sep. 29, 2025

Related U.S. Application Data
(62) Division of application No. 17/613,927, filed on May 27, 2020.

(30) Foreign Application Priority Data
May 27, 2019 (EP) 19176722.7

(51) Int. Cl. C12N 5/079; C07K 14/53; C07K 14/54

(52) U.S. Cl. CPC C12N 5/0622; C07K 14/53; C07K 14/54; C12N 2501/22; C12N 2501/2334; C12N 2502/08; C12N 2506/45; C12N 2830/003

(57) ABSTRACT

The present invention relates to a method for the production of microglia from stem cells comprising the steps of a) targeted insertion of a nucleotide sequence encoding a transcriptional regulator protein into a first genomic safe harbour site; and b) targeted insertion of the coding sequence of the transcription factor PU.1 (SEQ ID NO: 1) into a second genomic safe harbour site, wherein the gene is operably linked to an inducible promoter, which is regulated by the transcriptional regulator protein; expression of PU.1 (SEQ ID NO: 2); and culturing the stem cells received from steps a) and b) with exposure to at least one growth factor or small molecule that mimics signaling during at least one stage of embryonic development of microglia or adult microglia proliferation, differentiation or polarization. Further, the present invention relates to the microglia obtained by the methods of the present invention and various uses thereof.

### CROSS-REFERENCE TO RELATED APPLICATIONS

[0001] This application is a divisional of U.S. patent application Ser. No. 17/613,927, filed on Nov. 23, 2021 (pending), which is a national stage of International Patent Application No. PCT/EP2020/064649, filed on May 27, 2020, which claims the benefit of and priority to EP patent application Ser. No. 19/176,722.7, filed on May 27, 2019, the contents of which are incorporated by reference in their entirety.

### REFERENCE TO A SEQUENCE LISTING

[0002] This application contains a Sequence Listing which has been submitted electronically in XML format. The Sequence Listing XML is incorporated herein by reference. Said XML file, created on Jan. 29, 2026, is named BBIO-004USD1_ST.xml and is 563,960 bytes in size.

### FIELD OF THE INVENTION

[0003] The present invention relates to a method for the production of microglia from stem cells comprising the steps of targeted insertion of a nucleotide sequence encoding a transcriptional regulator protein into a first genomic safe harbour site; and targeted insertion of the coding sequence of the transcription factor PU.1 into a second genomic safe harbour site, wherein the gene is operably linked to an inducible promoter, which is regulated by the transcriptional regulator protein; expression of PU.1; and culturing the stem cells received from steps a) and b) with exposure to at least one growth factor or small molecule that recapitulates signaling during at least one stage of embryonic development of microglia or adult microglia proliferation, differentiation or polarization. Further, the present invention relates to the microglia obtained by the methods of the present invention and various uses thereof.

### BACKGROUND OF THE INVENTION

[0004] Microglia are the resident immune cells in the central nervous system (CNS) [Schafer et al., 2015]. They originate from early yolk sac macrophages that arise during the first wave of primitive haematopoiesis in early embryonic development. Primitive yolk sac macrophages spread through the blood stream as soon as the circulatory system is established to populate the developing CNS. In contrast to tissue-resident macrophages in other organs, microglia are not replaced by foetal monocytes during later stages of embryonic development [McGrath et al., 303; Ginhoux et al., 2010; Gomez Perdiguero et al., 2015]. After establishing the microglial population during early embryonic development, microglia are self-maintained throughout life by local proliferation, not replaced by bone-marrow-derived cells [Reu et al., 2017]. Microglia are uniformly distributed throughout the brain and spinal cord and play crucial roles in the development, maintenance, plasticity and defence of the CNS [Schafer et al., 2015]. In the healthy CNS, “resting” homeostatic microglia are highly ramified cells with a small cell body and fine cellular processes. These microglial processes are motile and continuously sampling their environment to scan for signals of internal or external danger (such as invading pathogens or signals generated locally by damaged or dying cells). Detection of such signals leads to microglial activation, which comprises profound changes in microglial morphology, gene expression, and function. Upon activation, microglia retract their processes and revert to an amoeboid-like appearance. They actively migrate to CNS lesions following chemotactic gradients and secrete inflammatory cytokines.

[0005] Through a large repertoire of cell surface receptors, including neurotransmitter and cytokine receptors, they communicate with neurons, other glial cells, and peripheral immune system cells [Kettenmann et al., 2011]. In light of their versatile functions and their unique position as representatives of the immune system in the healthy CNS, it is not surprising that microglia have been implicated in the onset and progression of many neurological diseases [Ransohoff et al., 2016].

[0006] Most recently, single cell transcriptomic profiling of microglia in mouse models of Alzheimer's disease (AD) and other neurodegenerative diseases including ageing, amyotrophic lateral sclerosis or tauopathy-related frontotemporal lobar degeneration (FTLD-tau), have revealed a pro-inflammatory transcriptomic signature in a small subset of microglia termed microglial neurodegenerative phenotype (MGnD) [Krasemann et al., 2017] or disease-associated microglia (DAM) [Keren-Saul et al., 2017]. The microglial switch from a homeostatic towards a disease-associated phenotype is thought to occur in response to altered brain homeostasis in neurodegeneration and is dependent on unique temporally and spatially controlled transcriptional programmes [Krasemann et al., 2017; Keren-Shaul et al., 2017; Butovsky et al., 1998]. In most cases, it remains unclear whether these cells have a protective or disease-inducing/propagating function. Access to human microglia in vitro and in vivo, in health and disease, would facilitate the identification of factors associated with both their beneficial and detrimental functions and the development of strategies to restore the homeostatic microglial signature or to induce the DAM microglial signature. This could allow us to target microglia for the treatment of neurodegenerative diseases.

[0007] The isolation or in vitro derivation of many human cell types remains challenging and inefficient. Especially cells of the human CNS, including microglia, are particularly difficult to obtain. In the past, low-efficient isolation from neurosurgical specimen or post-mortem brain tissue represented the only access route. Human pluripotent stem cells (hPSCs) represent an unlimited and renewable source from which, in theory, all cell types of the human organism can be produced [Thomson et al., 1998]. The ground-breaking discovery that human skin fibroblasts can be readily converted into human induced pluripotent stem cells (hiPSCs) that exhibit the same properties as embryonic stem cells, allows the generation of autologous and bespoke cell types for applications in regenerative medicine. For several key applications including disease modelling, drug discovery, and cell transplantation, large-scale manufacture of mature human cell types from hPSCs is required. Recently, the first hPSC-differentiation protocol for the generation of microglia was published. It was based on the initial formation of embryoid-bodies (EBs) cultured for several months in the same “neuroglial differentiation medium, the component concentrations of which were adjusted to match those of human cerebrospinal fluid” supplemented with interleukin (IL)-34 and colony-stimulating factor 1 (CSF-1) [Muffat et al., 2016]. This seminal publication provided an elaborate media composition for final maturation and maintenance of human microglia. However, the long duration of the protocol, ill-defined initial steps of differentiation (i.e. EB-based, intermediate steps hardly following embryonic rationales), and the need for several mechanical manipulation steps for cell purification are likely to prohibit the widespread application of this protocol. Subsequently, several other groups demonstrated the generation of microglia-like cells from hPSCs by similar, yet different classical differentiation approaches [Abud et al., 2017; Takata et al., 2017; Haenseler et al., 2017; Pandya et al., 2017; Douvaras et al., 2017]. Nonetheless, the in vitro derivation of specific human cell types, including microglia, in a quantity and purity that is required for downstream applications remains challenging, and alternative methods are currently sought [Cohen et al., 2011]. A more recent manufacturing strategy compared to classical differentiation is direct cellular reprogramming [Ladewig et al., 2013]. It refers to the direct conversion of any cell type (typically skin fibroblasts) into another without progression through a pluripotent intermediate. Although providing a quick route for cell production from easily accessible cell types, the yield and purity of the desired cell populations remain low and insufficient [Zhang et al., 2013]. Recently, a third route, termed “forward programming”, was proposed for the manufacture of mature human cell types with unprecedented speed and efficiency [Zhang et al., 2013].

[0008] Forward programming, as a method of directly converting pluripotent stem cells, including hPSCs, to mature cell types has been recognised as a powerful strategy for the derivation of human cells. It involves the forced expression of key lineage transcription factors (or non-coding RNAs, including lncRNA and microRNA), in order to convert the stem cell into a particular mature cell type. Currently available forward programming protocols are largely based on lentiviral transduction of cells, which results in variegated expression or complete silencing of randomly inserted inducible cassettes. This results in the need for additional purification steps in order to isolate a sub-population expressing the required transcription factors. Thus, further refinements of these methods are clearly required.

[0009] Any refinements to the stated methods must ensure that stable transcription of the genetic material contained within the inducible cassette, such as a transgene, is resistant to silencing and other negative integration site-related influences. Silencing may be caused by multiple epigenetic mechanisms, including DNA methylation or histone modifications. With prior art methods based on lentiviral transduction, the cells obtained are a heterogeneous population with the transgene expressed fully, partially or silenced. Clearly, this is not desirable for many applications. Viral vectors demonstrate a tendency to integrate their genetic material into transcriptionally active areas of the genome, thus increasing the potential for oncogenic events due to insertional mutagenesis. For many applications, it is desirable to control the transcription of inserted genetic material in a cell, such that an inducible cassette may be turned on as required and transcribed at particular levels, including high levels. This cannot be achieved if the insertion of the inducible cassette is random in the genome.

[0010] The problem, of microglia being both involved in several serious diseases and entangled into the brain tissue in a way that their isolation from living tissue remains elusive, has been addressed in several publications. To overcome this problem, human stem cells are used to generate microglia or microglia-like cells for example through defined culturing conditions [Muffat et al., 2016] or co-culturing with stem cell derived neurons [Haenseler et al., 2017; Takata et al., 2017]. These methods rely only on the exposure to growth factors and cytokines to differentiate stem cells into microglia.

[0011] Further the need for this special cell type is huge as they play an important role in virtually all diseases of the central nervous system, including neurodegenerative diseases, neuroinflammatory or autoimmune diseases, auto-antibody-mediated encephalitis or infectious diseases, neurovascular diseases, stroke, traumatic brain injuries and cancer, yet the precise mechanisms underlying their role in different diseases remain unclear. Prior art coincides, stem cell-derived microglia are indeed recapitulating the original patients disease-phenotype [Muffat et al., 2016; Abud et al., 2017; Takata et al., 2017]. With this knowledge, the enormous scientific gap of microglia involvement in certain diseases can be overcome by generating microglia from stem cells. However the classical protocols to differentiate stem cells are very time-consuming and the results are not convincing.

[0012] The inventors of the present invention have thus developed a quick method for generating microglia from stem cells by using a stable introduction of an inducible cassette into the genome of a stem cell, whilst being able to control the transcription of that inducible cassette and thereby the inserted transcription factors. The potential of these transcription factors to function as reprogramming factors for the generation of microglia was not known before and represents the unique knowledge of the inventors. This enables them to create a pure microglia population expressing all the surface markers and RNA observed in natural microglia populations. Moreover this method can be used to differentiate microglia from human iPS cells of neurodegenerative disease patients and thus enables to analyse a cell population that otherwise remains completely inert to medical examinations. Accordingly, there is a strong need for manufacture of mature human microglia from easily accessible sources. The technical problem underlying the present application is thus to comply with these needs. The technical problem is solved by providing the embodiments reflected in the claims, described in the description and illustrated in the examples and figures given below.

### SUMMARY OF THE INVENTION

[0013] The inventors of the present invention have developed a method for the production of microglia from stem cells.

[0014] The present invention relates to a method for the production of microglia from stem cells, comprising the steps of a) targeted insertion of a nucleotide sequence encoding a transcriptional regulator protein into a first genomic safe harbour site; and b) targeted insertion of the coding sequence of the transcription factor PU.1 (SEQ ID NO: 1) into a second genomic safe harbour site, wherein the gene is operably linked to an inducible promoter, which is regulated by the transcriptional regulator protein; expression of PU.1 (SEQ ID NO: 2); and c) culturing the stem cells received from steps a) and b) with exposure to at least one growth factor or small molecule that recapitulates signaling during at least one stage of embryonic development of microglia or adult microglia proliferation, differentiation or polarization.

[0015] In one embodiment of the method of the present invention, the at least one growth factor or small molecule is selected from the group consisting of Activin A (SEQ ID NO: 7), BMP4 (SEQ ID NO: 8), FGF (SEQ ID NO: 9), VEGF-A (SEQ ID NO: 10), LY294002, CHIR99021, SCF (SEQ ID NO: 11), IL-3 (SEQ ID NO: 12), IL-6 (SEQ ID NO: 13), CSF1 (SEQ ID NO: 14), IL-34 (SEQ ID NO: 15), CSF2 (SEQ ID NO: 16), CD200 (SEQ ID NO: 17), CX3CL1 (SEQ ID NO: 18), TGFβ1 (SEQ ID NO: 19), and IDE1.

[0016] In a further embodiment of the method of the present invention, the at least one growth factor is CSF1 (SEQ ID NO: 14) or IL-34 (SEQ ID NO: 15).

[0017] In an additional embodiment of the method of the present invention, the at least one small molecule is CHIR99021, LY294002 or IDE1.

[0018] In another embodiment of the method of the present invention, the first and the second genomic safe harbour sites are different.

[0019] In a further embodiment of the method of the present invention, the method further comprises insertion of the coding sequence of the gene of the transcription factor CEBPB (SEQ ID NO: 3) and expression thereof.

[0020] In another embodiment of the method of the present invention, the method further comprises insertion of the coding sequence of the gene of the transcription factor RUNX1 (SEQ ID NO: 4) and expression thereof.

[0021] In a further embodiment of the method of the present invention, the method further comprises insertion of the coding sequence of the gene of the transcription factor IRF8 (SEQ ID NO: 5) and expression thereof.

[0022] In another embodiment of the method of the present invention, the method further comprises insertion of the coding sequence of the gene of the transcription factor SALL1 (SEQ ID NO: 6) and expression thereof.

[0023] In an additional embodiment of the method of the present invention, the transcriptional regulator protein is the reverse tetracycline transactivator (rtTA) (SEQ ID NO: 20) and the activity thereof is controlled by doxycycline or tetracycline.

[0024] In another embodiment of the method of the present invention, the inducible promoter includes a Tet Responsive Element (TRE) (SEQ ID NO: 21).

[0025] In a further embodiment of the method of the present invention, said first and said second genomic safe harbour sites are selected from the group consisting of the hROSA26 locus (SEQ ID NO: 22), the AAVS1 locus (SEQ ID NO: 23), the CLYBL gene (SEQ ID NO: 24), the CCR5 gene (SEQ ID NO: 25), the HPRT gene (SEQ ID NO: 26) or genes with the site ID 325 on chromosome 8 (SEQ ID NO: 27), site ID 227 on chromosome 1 (SEQ ID NO: 28), site ID 229 on chromosome 2 (SEQ ID NO: 29), site ID 255 on chromosome 5 (SEQ ID NO: 30), site ID 259 on chromosome 14 (SEQ ID NO: 31), site ID 263 on chromosome X (SEQ ID NO: 32), site ID 303 on chromosome 2 (SEQ ID NO: 33), site ID 231 on chromosome 4 (SEQ ID NO: 34), site ID 315 on chromosome 5 (SEQ ID NO: 35), site ID 307 on chromosome 16 (SEQ ID NO: 36), site ID 285 on chromosome 6 (SEQ ID NO: 37), site ID 233 on chromosome 6 (SEQ ID NO: 38), site ID 311 on chromosome 134 (SEQ ID NO: 39), site ID 301 on chromosome 7 (SEQ ID NO: 40), site ID 293 on chromosome 8 (SEQ ID NO: 41), site ID 319 on chromosome 11 (SEQ ID NO: 42), site ID 329 on chromosome 12 (SEQ ID NO: 43), site ID 313 on chromosome X (SEQ ID NO: 44).

[0026] In another embodiment of the method of the present invention, said stem cell is a pluripotent stem cell, an induced pluripotent stem cell (iPSC), a neural progenitor cell, hematopoietic stem cell or an embryonic stem cell (ESC).

[0027] In a further embodiment of the method of the present invention, said stem cell is a human or a mouse stem cell.

[0028] The present invention also relates to a microglia cell obtained by any of the methods according to the present invention, preferably wherein the microglia expresses at least one microglia surface protein selected from the group consisting of ITGAM (CD11B) (SEQ ID NO: 45), ITGAX (CD11C) (SEQ ID NO: 46), CD14 (SEQ ID NO: 47), CD16 (SEQ ID NO: 48), ENTPD1 (CD39) (SEQ ID NO: 49), PTPRC (CD45) (SEQ ID NO: 50), CD68 (SEQ ID NO: 51), CSF1R (CD115) (SEQ ID NO: 52), CD163 (SEQ ID NO: 53), CX3CR1 (SEQ ID NO: 54), TREM2 (SEQ ID NO: 55), P2RY12 (SEQ ID NO: 56), TMEM119 (SEQ ID NO: 57), and HLA-DR (SEQ ID NO: 58).

[0029] In a further embodiment of the present invention, the microglia cell is for use in therapy.

[0030] Further, the present invention is directed to the use of such a microglia cell according to the present invention for in vitro diagnostics of a disease. Preferably, the disease is selected from the group consisting of diseases of the central nervous system, preferably neurodegenerative diseases; more preferably Alzheimer's disease, Parkinson's disease, frontotemporal dementia or Amyotrophic Lateral Sclerosis; neuroinflammatory or autoimmune diseases, preferably Multiple Sclerosis, auto-antibody-mediated encephalitis or infectious diseases, neurovascular diseases; preferably stroke, vasculitis; traumatic brain injury, and cancer.

[0031] Further, the present invention is directed to the use of such a microglia cell according to the present invention for in vitro culturing with brain organoids.

### BRIEF DESCRIPTION OF THE FIGURES

[0032] FIG. 1 shows a scheme of major pathways for cell manufacturing, that are reprogramming of somatic cells (fibroblasts) into induced pluripotent stem cells (iPSC) using the four defined transcription factors Klf4, Oct4, c-Myc and Sox2, direct reprogramming as direct conversion of somatic cells into the desired target cell type using defined transcription factors, classical differentiation approaches, representing a stepwise conversion from a pluripotent stem cell into the desired target cell, and forward programming as the direct conversion of hPSCs into the target cell type. (Abbreviations: TF=transcription factor, ESC=embryonic stem cell, iPSC=induced pluripotent stem cell (ESCs and iPSCs are collectively termed pluripotent stem cells (PSCs))

[0033] FIG. 2 shows the targeting strategy used in the present invention. The dox inducible Tet-ON system was targeted into the human ROSA26 locus (CAG-rtTA) and the AAVS1 site (TRE-EGFP) of hPSCs. (Abbreviations: HAR=homology arm, Neo=neomycin-resistance gene, CAG=constitutive CAG promoter, rtTA=reverse tetracycline-controlled transactivator, Puro=puromycin-resistance gene, TRE=inducible Tet-responsive element, EGFP=enhanced green fluorescent protein, SA=splice acceptor, T2A=T2A cleavage site, pA=poly-adenylation site)

[0034] FIG. 3 shows a table of the key transcription factors of the microglia lineage, selected as candidate reprogramming factors, the length of their coding sequence and their source.

[0035] FIG. 4 shows donor plasmids that were generated by molecular cloning and used for the genetic modification of either the ROSA26 GSH or the AAVS1 GSH. (Abbreviations: HAR=homology arm, Neo=neomycin-resistance gene, CAG=constitutive CAG promoter, rtTA=reverse tetracycline-controlled transactivator, Puro=puromycin-resistance gene, TRE=inducible Tet-responsive element, EGFP=enhanced green fluorescent protein, SA=splice acceptor, T2A=T2A cleavage site, pA=poly-adenylation site)

[0036] FIG. 5 shows a scheme of the microglia forward programming protocol (see FIG. 5A). Time-course of cell surface markers expressed on primitive macrophages and microglia assessed by flow cytometry (n=2 biological replicates) (see FIG. 5B and FIG. 5C). Day 20 microglia monoculture: phase contrast live image of a microglia-like cell and ICC for the microglia-signature transmembrane protein TMEM119, for which dedicated labelled flow-antibodies are not available (see FIG. 5D). Day 20 microglia/neuron coculture: ICC for the intracellular calcium-binding protein IBA1 (also known as AIF1) and the neuronal marker BIII-tubulin (TUBB3) (see FIG. 5E). QPCR (SYBR green) of hiPSCs and microglia in monoculture (day 20). All values are relative to the housekeeping gene GAPDH and normalised to hiPSCs. For the transcripts of SPI1 and CEBPB two different primer pairs (see SEQ ID NOs: 80-87; SEQ ID NO: 80: SPI1 total forward primer; SEQ ID NO: 81: SPI1 total reverse primer; SEQ ID NO: 82: SPI1 endo forward primer; SEQ ID NO: 83: SPI1 endo reverse primer; SEQ ID NO: 84: CEBPB total forward primer; SEQ ID NO: 85: CEBPB total reverse primer; SEQ ID NO: 86: CEBPB endo forward primer; SEQ ID NO: 87: CEBPB endo reverse primer) were used, detecting either all transcripts (total), or only transcripts from the respective endogenous gene loci, but not the AAVS1-targeted transgenes (endo). As expected, no difference was detected in the relative expression levels, as transgene expression was turned off (by withdrawal of dox at day 10 of the protocol), thus confirming the transgene-independence of the cellular phenotype (F).

[0037] FIG. 6 shows immunocytochemistry of a double targeted iPS cell line induced with doxycycline for 24 hours. The cells were positive for PU.1 and CEBPB but negative for OCT4.

[0038] FIG. 7 shows a map of the Donor Plasmid pUC_AAVS1_p-Resp-(PU.1-CEBPB) (SEQ ID NO: 61), for genetic modification of the AAVS1 locus, containing the coding sequence of the transcription factors PU.1 and CEBPB.

[0039] FIG. 8 shows a map of the Donor Plasmid pUC_AAVS1_p-Resp-(PU.1-IRF8) (SEQ ID NO: 62), for genetic modification of the AAVS1 locus, containing the coding sequence of the transcription factors PU.1 and IRF8.

[0040] FIG. 9 shows a map of the Donor Plasmid pUC_AAVS1_p-Resp-(PU.1-RUNX1) (SEQ ID NO: 63), for genetic modification of the AAVS1 locus, containing the coding sequence of the transcription factors PU.1 and RUNX1.

[0041] FIG. 10 shows a map of the Donor Plasmid pUC_AAVS1_p-Resp-(PU.1) (SEQ ID NO: 64), for genetic modification of the AAVS1 locus, containing the coding sequence of the transcription factor PU.1.

[0042] FIG. 11 shows a map of the Donor Plasmid pUC_AAVS1_p-Resp-(PU.1-SALL1) (SEQ ID NO: 65), for genetic modification of the AAVS1 locus, containing the coding sequence of the transcription factors PU.1 and SALL1.

[0043] FIG. 12 shows a map of the plasmid ROSA-guideA_Cas9n (SEQ ID NO: 66) containing the coding sequence of the Cas enzyme and guide RNA A.

[0044] FIG. 13 shows a map of the plasmid ROSA-guideB_Cas9n (SEQ ID NO: 67) containing the coding sequence of the Cas enzyme and guide RNA B.

[0045] FIG. 14 shows a map of the donor plasmid pUC_ROSA_n_CAG-rtTA (SEQ ID NO: 72) containing the constitutive CAG promoter and the rtTA.

[0046] FIG. 15 shows a map of the plasmid pZFN-AAVS1-L_ELD (SEQ ID NO: 68).

[0047] FIG. 16 shows a map of the plasmid pZFN-AAVS1-R_KKR (SEQ ID NO: 69).

[0048] The following abbreviations are used: T2A: T2A peptide (ribosomal skipping signal), puroR: puromycin resistance gene, pA: polyadenylation signal, CAG: constitutive CAG promoter, TRE3GV: Tet-responsive element, HA-R, HA-L: homology arm (right, left), AmpR: Ampicillin resistance gene, ori: origin of replication, NeoR: neomycin resistance gene, KanR: kanamycin resistance gene.

### DETAILED DESCRIPTION OF THE INVENTION

[0049] The present invention relates to a method for the production of microglia from stem cells, comprising the steps of a) targeted insertion of a nucleotide sequence encoding a transcriptional regulator protein into a first genomic safe harbour site; and b) targeted insertion of the coding sequence of the transcription factor PU.1 (SEQ ID NO: 1) into a second genomic safe harbour site, wherein the gene is operably linked to an inducible promoter, which is regulated by the transcriptional regulator protein; expression of PU.1 (SEQ ID NO: 2); and c) culturing the stem cells received from steps a) and b) with exposure to at least one growth factor or small molecule that recapitulates signaling during at least one stage of embryonic development of microglia or adult microglia proliferation, differentiation or polarization.

[0050] In one embodiment, the present invention relates to a method of producing microglia from stem cells, comprising the steps of a) targeted insertion of a nucleotide sequence encoding a transcriptional regulator protein into a first genomic safe harbour site; and b) targeted insertion of the coding sequence of the transcription factor PU.1 (SEQ ID NO: 1) into a second genomic safe harbour site, wherein the gene is operably linked to an inducible promoter, which is regulated by the transcriptional regulator protein; expression of PU.1 (SEQ ID NO: 2); and c) culturing the stem cells received from steps a) and b) with exposure to at least one growth factor or small molecule that recapitulates signaling during at least one stage of embryonic development of microglia or adult microglia proliferation, differentiation or polarization.

[0051] In one embodiment, the present invention relates to a method of producing microglia from stem cells, comprising the steps of a) targeted insertion of a nucleotide sequence encoding a transcriptional regulator protein into a first genomic safe harbour site; and b) targeted insertion of the coding sequence of the transcription factor PU.1 (SEQ ID NO: 1) into a second genomic safe harbour site, wherein the gene is operably linked to an inducible promoter, which is regulated by the transcriptional regulator protein; expression of PU.1 (SEQ ID NO: 2); and c) culturing the stem cells received from steps a) and b) with exposure to at least one growth factor or small molecule that recapitulates signaling during at least one stage of embryonic development of microglia.

[0052] In one embodiment, the present invention relates to a method for the production of microglia from stem cells, comprising the steps of a) targeted insertion of a nucleotide sequence encoding a transcriptional regulator protein into a first genomic safe harbour site; and b) targeted insertion of the coding sequence of the transcription factor PU.1 (SEQ ID NO: 1) into a second genomic safe harbour site, wherein the gene is operably linked to an inducible promoter, which is regulated by the transcriptional regulator protein; expression of PU.1 (SEQ ID NO: 2); and c) culturing the stem cells received from steps a) and b) with exposure to at least one growth factor or small molecule that recapitulates signaling during at least one stage of embryonic development of microglia.

[0053] In one embodiment, the present invention also relates to a method for the production of microglia from stem cells, comprising the steps of a) targeted insertion of a nucleotide sequence encoding a transcriptional regulator protein into a first genomic safe harbour site; and b) targeted insertion of the coding sequence of the transcription factor PU.1 (SEQ ID NO: 1) into a second genomic safe harbour site, wherein the gene is operably linked to an inducible promoter, which is regulated by the transcriptional regulator protein; expression of PU.1 (SEQ ID NO: 2); and c) culturing the stem cells received from steps a) and b) with exposure to at least one growth factor or small molecule that recapitulates signaling during at least one stage of adult microglia differentiation.

[0054] In one further embodiment, the present invention relates to a method for the production of microglia from stem cells, comprising the steps of a) targeted insertion of a nucleotide sequence encoding a transcriptional regulator protein into a first genomic safe harbour site; and b) targeted insertion of the coding sequence of the transcription factor PU.1 (SEQ ID NO: 1) into a second genomic safe harbour site, wherein the gene is operably linked to an inducible promoter, which is regulated by the transcriptional regulator protein; expression of PU.1 (SEQ ID NO: 2); and c) culturing the stem cells received from steps a) and b) with exposure to at least one growth factor or small molecule that recapitulates signaling during at least one stage of adult microglia polarization.

[0055] In another embodiment, the present invention relates to a method for the production of microglia from stem cells, comprising the steps of a) targeted insertion of a nucleotide sequence encoding a transcriptional regulator protein into a first genomic safe harbour site; and b) targeted insertion of the coding sequence of the transcription factor PU.1 (SEQ ID NO: 1) into a second genomic safe harbour site, wherein the gene is operably linked to an inducible promoter, which is regulated by the transcriptional regulator protein; expression of PU.1 (SEQ ID NO: 2); and c) culturing the stem cells received from steps a) and b) with exposure to at least one growth factor or small molecule that recapitulates embryonic development of microglia.

[0056] In one further embodiment, the present invention relates to a method for the production of microglia from stem cells, comprising the steps of a) targeted insertion of a nucleotide sequence encoding a transcriptional regulator protein into a first genomic safe harbour site; and b) targeted insertion of the coding sequence of the transcription factor PU.1 (SEQ ID NO: 1) into a second genomic safe harbour site, wherein the gene is operably linked to an inducible promoter, which is regulated by the transcriptional regulator protein; expression of PU.1 (SEQ ID NO: 2); and c) culturing the stem cells received from steps a) and b) with exposure to at least one growth factor or small molecule that mimics signaling during at least one stage of embryonic development of microglia or adult microglia proliferation, differentiation or polarization.

[0057] In one further embodiment, the present invention relates to a method for the production of microglia from stem cells, comprising the steps of a) targeted insertion of a nucleotide sequence encoding a transcriptional regulator protein into a first genomic safe harbour site; and b) targeted insertion of the coding sequence of the transcription factor PU.1 (SEQ ID NO: 1) into a second genomic safe harbour site, wherein the gene is operably linked to an inducible promoter, which is regulated by the transcriptional regulator protein; expression of PU.1 (SEQ ID NO: 2); and c) culturing the stem cells received from steps a) and b) with exposure to at least one growth factor or small molecule that mimics signaling during at least one stage of embryonic development of microglia.

[0058] In one embodiment, the present invention also relates to a method for the production of microglia from stem cells, comprising the steps of a) targeted insertion of a nucleotide sequence encoding a transcriptional regulator protein into a first genomic safe harbour site; and b) targeted insertion of the coding sequence of the transcription factor PU.1 (SEQ ID NO: 1) into a second genomic safe harbour site, wherein the gene is operably linked to an inducible promoter, which is regulated by the transcriptional regulator protein; expression of PU.1 (SEQ ID NO: 2); and c) culturing the stem cells received from steps a) and b) with exposure to at least one growth factor or small molecule that recapitulates embryonic development of microglia in vitro.

[0059] As used within the present invention, the term “microglia” means a mature cell type being a distinct cell population of the central nervous system. As defined in Comparative Anatomy and Histology, “microglia is the resident histiocytic-type cell and the key innate immune effector of the CNS. They are often described as either resting (i.e., ramified) or activated, but these terms fail to convey the dynamic remodeling of their fine processes and constitutive immunosurveillance activity. ( . . . ) Evidence suggests that early microglia are derived from yolk sac progenitors.” (Hagan et al., 2012). Meaning microglia are generated during early embryonic stages and reside in the brain throughout adult live.

[0060] As used within the present invention, the term “production of microglia” means the generation of a mature cell (microglia) from a stem cell, which is obtained by any of the methods of the present invention as described herein.

[0061] As used within the present invention, the term “stem cell” means a type of cell that is able to divide for producing more cells or to develop into a cell that has a particular purpose. In the present invention, the used stem cell might be a pluripotent stem cell. Pluripotent stem cells have the potential to differentiate into almost any cell in the body. There are several sources of pluripotent stem cells. Embryonic stem cells (ES cells) are pluripotent stem cells derived from the inner cell mass of a blastocyst, an early-stage preimplantation embryo. Induced pluripotent stem cells (iPSCs) are adult cells that have been genetically reprogrammed to an embryonic stem cell-like state by being forced to express genes and factors important for maintaining the defining properties of embryonic stem cells. In 2006 it was shown that the introduction of four specific genes encoding transcription factors could convert adult cells into pluripotent stem cells (Takahashi et al., 2006), but subsequent work has reduced/altered the number of genes that are required. Oct-3/4 and certain members of the Sox gene family have been identified as potentially crucial transcriptional regulators involved in the induction process. Additional genes including certain members of the Klf family, the Myc family, Nanog, and LIN28, may increase the induction efficiency. Examples of the genes, which may be contained in the reprogramming factors, include Oct3/4, Sox2, Soxl, Sox3, Soxl5, Soxl7, Klf4, Klf2, c-Myc, N-Myc, L-Myc, Nanog, Lin28, Fbx15, ERas, ECAT15-2, Tell, beta-catenin, Lin28b, Sall1, Sall4, Esrrb, Nr5a2, Tbx3 and Glisl, and these reprogramming factors may be used singly, or in combination of two or more kinds thereof.

[0062] If the cells modified by insertion of an inducible cassette are to be used in a human patient, it may be preferred that the cell is an iPSC derived from that individual. Such use of autologous cells would remove the need for matching cells to a recipient. Alternatively, commercially available iPSC may be used, which are known to a person skilled in the art. Alternatively, the cells may be a tissue-specific stem cell, which may also be autologous or donated. Suitable cells include epiblast stem cells, induced neural stem cells and other tissue-specific stem cells.

[0063] In some embodiments of the method of the present invention, it may be preferred that the used stem cell is an embryonic stem cell or stem cell line. Numerous embryonic stem cell lines are now available, for example, WA01 (HI), WA09 (H9), KhES-1, KhES-2 and KhES-3. Stem cell lines, which have been derived without destroying an embryo, are available. The present invention does not extend to any methods which involve the destruction of human embryos.

[0064] As used within the present invention, the term “targeted insertion” means the insertion into a genomic safe harbour (GSH) site, which is preferably specifically within the sequence of the GSH as described elsewhere. Any suitable technique for insertion of a polynucleotide into a specific sequence may be used, and several are described in the art. Suitable techniques include any method known to a person skilled in the art, which introduces a break at the desired location and permits recombination of the vector into the gap. Thus, a crucial first step for targeted site-specific genomic modification is the creation of a double-strand DNA break (DSB) at the genomic locus to be modified. Distinct cellular repair mechanisms can be exploited to repair the DSB and to introduce the desired sequence, and these are non-homologous end joining repair (NHEJ), which is more prone to error; and homologous recombination repair (HR) mediated by a donor DNA template, that can be used to insert inducible cassettes.

[0065] Several techniques exist to allow customized site-specific generation of DSB in the genome. Many of these involve the use of customized endonucleases, such as zinc finger nucleases (ZFNs), transcription activator-like effector nucleases (TALENs) or the clustered regularly interspaced short palindromic repeats/CRISPR associated protein (CRISPR/Cas9) system (Gaj et al., 2013). Zinc finger nucleases are artificial enzymes, which are generated by fusion of a zinc-finger DNA-binding domain to the nuclease domain of the restriction enzyme Fokl. The latter has a non-specific cleavage domain, which must dimerize in order to cleave DNA. This means that two ZFN monomers are required to allow dimerization of the Fokl domains and to cleave the DNA. The DNA binding domain may be designed to target any genomic sequence of interest, may be a tandem array of Cys2His2 zinc fingers, each of which recognises three contiguous nucleotides in the target sequence. The two binding sites are separated by 5-7 bp to allow optimal dimerization of the Fokl domains. The enzyme thus is able to cleave DNA at a specific site, and target specificity is increased by ensuring that two proximal DNA-binding events must occur to achieve a double-strand break. Transcription activator-like effector nucleases, or TALENs, are dimeric transcription factor/nucleases. They are made by fusing a TAL effector DNA-binding domain to a DNA cleavage domain (a nuclease). Transcription activator-like effectors (TALENs) can be engineered to bind practically any desired DNA sequence, so when combined with a nuclease, DNA can be cut at specific locations. TAL effectors are proteins that are secreted by Xanthomonas bacteria, the DNA binding domain of which contains a repeated highly conserved 33-34 amino acid sequence with divergent 12th and 13th amino acids. These two positions are highly variable and show a strong correlation with specific nucleotide recognition. This straightforward relationship between amino acid sequence and DNA recognition has allowed for the engineering of specific DNA-binding domains by selecting a combination of repeat segments containing appropriate residues at the two variable positions. TALENs are thus built from arrays of 33 to 35 amino acid modules, each of which targets a single nucleotide. By selecting the array of the modules, almost any sequence may be targeted. The nuclease used may be Fokl or a derivative thereof.

[0066] Three types of CRISPR mechanisms have been identified, of which type II is best studied. The CRISPR/Cas9 system (type II system) utilises the Cas9 nuclease to make a double-stranded break in DNA at a site determined by a short guide RNA. The CRISPR/Cas system is a prokaryotic immune system that confers resistance to foreign genetic elements. CRISPR are segments of prokaryotic DNA containing short repetitions of base sequences. Each repetition is followed by short segments of “protospacer DNA” from previous exposures to foreign genetic elements. CRISPR spacers recognize and cut the exogenous genetic elements using RNA interference. The CRISPR immune response occurs through two steps: CRISPR-RNA (crRNA) biogenesis and crRNA-guided interference. CrRNA molecules are composed of a variable sequence transcribed from the protospacer DNA and a CRISP repeat. Each crRNA molecule then hybridizes with a second RNA, known as the trans-activating CRISPR RNA (tracrRNA) and together these two eventually form a complex with the nuclease Cas9. The protospacer DNA encoded section of the crRNA directs Cas9 to cleave complementary target DNA sequences, if they are adjacent to short sequences known as protospacer adjacent motifs (PAMs). This natural system has been engineered and exploited to introduce DSB breaks in specific sites in genomic DNA, amongst many other applications. In particular, the CRISPR type II system from Streptococcus pyogenes may be used. At its simplest, the CRISPR/Cas9 system comprises two components that are delivered to the cell to provide genome editing: The Cas9 nuclease itself and a small guide RNA (gRNA). The gRNA is a fusion of a customised, site-specific crRNA (directed to the target sequence) and a standardized tracrRNA.

[0067] Once a DSB has been made, a donor template with homology to the targeted locus is supplied. The DSB may be repaired by the homology-directed repair (HDR) pathway allowing for precise insertions to be made. Derivatives of this system are also possible. Mutant forms of Cas9 are available, such as Cas9D10A, with only nickase activity. This means, it cleaves only one DNA strand, and does not activate NHEJ. Instead, when provided with a homologous repair template, DNA repairs are conducted via the high-fidelity HDR pathway only. Cas9D10A may be used in paired Cas9 complexes designed to generate adjacent DNA nicks in conjunction with two sgRNAs, complementary to the adjacent area on opposite strands of the target site, which may be particularly advantageous. The elements for making the double-strand DNA break may be introduced in one or more vectors such as plasmids for expression in the cell. Thus, any method of making specific, targeted double strand breaks in the genome in order to allow the insertion of a nucleotide sequence/gene/inducible cassette may be used in the method of the present invention. It may be preferred that the method of the present invention utilises for inserting the gene/inducible cassette any one or more of ZFNs, TALENS and/or CRISPR/Cas9 systems or any derivative thereof.

[0068] Once the DSB has been made by any appropriate means, the gene/inducible cassette for insertion may be supplied in any suitable fashion as described below. The gene/inducible cassette and associated genetic material form the donor DNA for repair of the DNA at the DSB and are inserted using standard cellular repair machinery/pathways. How the break is initiated will alter which pathway is used to repair the damage, as noted above. However, this is also within the knowledge of a person skilled in the art.

[0069] As used within the present invention, the term “gene” means the basic physical unit heredity, a linear sequence of nucleotides along a segment of DNA that provides the coded instructions for synthesis of RNA, which, when translated into protein, leads to the expression of hereditary character.

[0070] As used within the present invention, the term “nucleotide sequence” refers to a succession of bases in a DNA segment forming a gene as defined above.

[0071] As used within the present invention, the term “transcriptional regulator protein” means a protein that binds to DNA, preferably sequence-specifically to a DNA site located in or near a promoter, and either facilitating the binding of the transcription machinery to the promoter, and thus transcription of the DNA sequence (a transcriptional activator) or blocks this process (a transcriptional repressor). Such entities are also known as transcription factors. The DNA sequence that a transcriptional regulator protein binds to is called a transcription factor-binding site or response element, and these are found in or near the promoter of the regulated DNA sequence. A responsive element is part of this invention. Transcriptional activator proteins bind to a response element and promote gene expression. Such proteins are preferred in the method of the present invention for controlling inducible cassette expression. Transcriptional repressor proteins bind to a response element and prevent gene expression. Transcriptional regulator proteins may be activated or deactivated by a number of mechanisms including binding of a substance, interaction with other transcription factors (e.g., homo- or hetero-dimerization) or coregulatory proteins, phosphorylation, and/or methylation. The transcriptional regulator may be controlled by activation or deactivation. If the transcriptional regulator protein is a transcriptional activator protein, it is preferred that the transcriptional activator protein requires activation. This activation may be through any suitable means, but it is preferred that the transcriptional regulator protein is activated through the addition of an exogenous substance to the stem cell. The supply of an exogenous substance to the stem cell can be controlled, and thus the activation of the transcriptional regulator protein can be controlled. Such transcriptional regulator proteins are also called inducible transcriptional regulator proteins.

[0072] As used within the present invention, the term “transcription factor” means a protein that binds to DNA, preferably sequence-specifically to a DNA site located in or near a promoter, and either facilitating the binding of the transcription machinery to the promoter, and thus transcription of the DNA sequence (a transcriptional activator) or blocks this process (a transcriptional repressor). In the context of the present invention, a transcription factor is a desired genetic sequence, preferably a DNA sequence that is to be transferred into a cell together with an inducible cassette. The introduction of an inducible cassette into the genome has the potential to change the phenotype of that cell by addition of a genetic sequence that permits gene expression. The method of the present invention provides for controllable transcription of the genetic sequence(s) of a set of transcription factors within the inducible cassette in the cell.

[0073] Master regulators may be one or more of: transcription factors, transcriptional regulators, cytokine receptors or signalling molecules and the like. A master regulator is an expressed gene that influences the lineage of the cell expressing it. It may be that a network of master regulators is required for the lineage of a cell to be determined. As used herein, a master regulator gene that is expressed at the inception of a developmental lineage or cell type, participates in the specification of that lineage by regulating multiple downstream genes either directly or through a cascade of gene expression changes. If the master regulator is expressed it has the ability to re-specify the fate of cells destined to form other lineages. The transcription factors, which may be used in the method of the present invention, include PU.1 (SEQ ID NO: 2) (gene SPI1, SEQ ID NO: 1), CEBPB (SEQ ID NO: 3), RUNX1 (SEQ ID NO: 4), IRF8 (SEQ ID NO: 5), and SALL1 (SEQ ID NO: 6).

[0074] As used within the present invention, the term “PU.1” (SEQ ID NO: 2) means a transcription factor also known as Hematopoietic Transcription Factor PU.1, Spi-1 Proto-Oncogene, 31 kDa Transforming Protein, Transcription Factor PU.1, Spleen Focus Forming Virus (SFFV) Proviral Integration Oncogene Spi1, Spleen Focus Forming Virus (SFFV) Proviral Integration Oncogene, or 31 kDa-Transforming Protein, SFPI1, SPI-1, SPI-A, PU.1 or OF, wherein “SPI1” refers to the gene (SEQ ID NO: 1) (Spi-1 Proto-Oncogene), which encodes an ETS-domain transcription factor that activates gene expression during myeloid and B-lymphoid cell development.

[0075] As used within the present invention, the term “genomic safe harbour site” means a genetic site, which allows the insertion of genetic material without deleterious effects for the cell and permits transcription of the inserted genetic material. Those skilled in the art may use these simplified criteria to identify a suitable GSH, and/or the more formal criteria. Insertions specifically within genomic safe harbour sites (GSH) are preferred over random genome integration, since this is expected to be a safer modification of the genome, and is less likely to lead to unwanted side effects, such as silencing natural gene expression or causing mutations that lead to cancerous cell types. Thus, a genomic safe harbour site is a locus within the genome, wherein a gene or other genetic material may be inserted without any deleterious effects on the cell or on the inserted genetic material. Most beneficial is a GSH site in which expression of the inserted gene sequence is not perturbed by any read-through expression from neighbouring genes and expression of the inducible cassette, minimizes interference with the endogenous transcription programme. More formal criteria have been proposed that assist in the determination of whether a particular locus is a GSH site (Pellenz et al., 2019). These criteria include a site that is (i)>300 kb from any cancer-related gene on all Oncogenes list, (ii)>300 kb from any miRNA/other functional small RNAs, (iii)>50 kb from any 5′ gene end, (iv)>50 kb away from any replication origin, (v)>50 kb away from any ultra-conserved element, (vi) low transcriptional activity (no mRNA±25 kb), (vii) not in copy number variable region (viii) in open chromatin (DHS signal±1 kb) and (ix) unique (1 copy in human genome). It may not be necessary to satisfy all of these proposed criteria, since GSH already identified do not fulfil all of these criteria. It is preferred, that a suitable GSH may satisfy at least 3, 4, 5, 6, 7 or 8 and most preferably all nine of these criteria.

[0076] In the methods of the present invention, insertions occur at different GSH. At least two GSH are required. The first GSH is modified by insertion of a transcriptional regulator protein. The second GSH is modified by the insertion of an inducible cassette, which comprises a coding sequence operably linked to an inducible promoter. Other genetic material may also be inserted with either or both of these elements. The genetic sequence, operably linked to an inducible promoter within the inducible cassette, is preferably a DNA sequence. The genetic sequence(s) of the inducible cassette preferably encode a RNA molecule and are thus capable of being transcribed. The transcription is controlled using the inducible promoter. The RNA molecule may be of any sequence, but is preferably an mRNA encoding a protein, a shRNA or a gRNA.

[0077] The first GSH can be any suitable GSH site. Optionally, it is a GSH with an endogenous promoter that is constitutively expressed, which will result in the inserted transcriptional regulator protein being constitutively expressed. A suitable GSH is the hROSA26 site for human cells. In a further embodiment of the present invention, the inserted transcriptional regulator protein, operably linked to a promoter, is a constitutive promoter. A constitutive promoter can be, for example, used in conjunction with an insertion in the hROSA26 site.

[0078] As used within the present invention, the term “inducible promoter” means a nucleotide sequence, which initiates and regulates transcription of a polynucleotide. An “inducible promoter” is a nucleotide sequence, wherein expression of a genetic sequence operably linked to the promoter is controlled by an analyte, co-factor, regulatory protein, etc. In one embodiment of the method of the present invention, the control is affected by the transcriptional regulator protein. It is intended that the term “promoter” or “control element” includes full-length promoter regions and functional (e.g., controls transcription or translation) segments of these regions. It is preferred that the gene encoding the transcriptional regulator protein is operably linked to a constitutive promoter. Alternatively, the first GSH can be selected such that it already has a constitutive promoter that can also drive expression of the transcriptional regulator protein gene and any associated genetic material. Constitutive promoters ensure sustained and high-level gene expression. Commonly used constitutive promoters include the human β-actin promoter (ACTB), cytomegalovirus (CMV), elongation factor-la (EFla), phosphoglycerate kinase (PGK) and ubiquitin C (UbC). The CAG promoter is a strong synthetic promoter frequently used to drive high levels of gene expression.

[0079] As used within the present invention, the term “culturing” means the growth of microorganisms such as bacteria and yeast, or human, plant, or animal cells under suitable conditions ensuring the growth, which are knowledge of the person skilled in the art.

[0080] As used within the present invention, the term “growth factor” means a signaling molecule that controls cell activities in an autocrine, paracrine or endocrine manner. As used herein, in the context of the present invention, the term “growth factor” may be used interchangeably with “cytokine”. Growth factors or cytokines are produced by different cell types of the organism and exert their biological functions by binding to specific receptors and activating associated downstream signaling pathways which in turn, regulate gene transcription in the nucleus and ultimately stimulate a biological response, including regulatory cellular processes like cell division, cell survival, cell differentiation, adhesion and migration.

[0081] As used within the present invention, the term “small molecule” means a bioactive molecule that is naturally or artificially produced and is capable of diffusion through the cell membrane and is able to regulate signaling pathways. Small molecules, which are preferably used within the present invention, may inhibit phosphatidylinositol 3-kinase (PI3K) and glycogen synthase kinase 3, respectively like LY294002 and CHIR99021.

[0082] As used within the present invention, the term “recapitulates signaling” means to simulate, to imitate or to resemble the functions of secreted molecules, such as growth factors and/or chemokines, influencing a cell in a natural environment and thereby being able to produce microglia by these actions.

[0083] As used within the present invention, the term “mimics signaling” means to simulate, to imitate, to resemble or to recapitulate the functions of secreted molecules, such as growth factors and/or chemokines, influencing a cell in a natural environment and thereby being able to produce microglia by these actions.

[0084] As used within the present invention, the term “embryonic development of microglia” means the stepwise transition of a pluripotent stem cell into a mature microglia cell according to the sequel of developmental microglia differentiation during human embryonic, fetal and postnatal development, starting from the pre-implantation blastocyst-stage embryo through to fully-established and self-maintained microglia population.

[0085] As used within the present invention, the term “adult microglia proliferation” means any cell division process that leads to a mature microglia cell.

[0086] As used within the present invention, the term “adult microglia differentiation” means the differentiation of a cell being in a microglia progenitor's state into an adult microglia cell type, that incorporates typical characteristics of a microglia cell in homeostatic/resting state.

[0087] As used within the present invention, the term “adult microglia polarization” means the reaction of a mature microglia cell to extracellular stimuli provided by the extracellular environment, respectively signals from injured neurons, glia cells, or exposure to plasma proteins, due to blood brain barrier dysfunction. This microglial reaction includes movement of the microglia cell towards the injury site and can either have a neuroprotective or -toxic effect.

[0088] Further, in one embodiment of the method of the present invention, the at least one growth factor or small molecule is selected from the group consisting of Activin A (SEQ ID NO: 7), BMP4 (SEQ ID NO: 8), FGF (SEQ ID NO: 9), VEGF-A (SEQ ID NO: 10), LY294002, CHIR99021, SCF (SEQ ID NO: 11), IL-3 (SEQ ID NO: 12), IL-6 (SEQ ID NO: 13), CSF1 (SEQ ID NO: 14), IL-34 (SEQ ID NO: 15), CSF2 (SEQ ID NO: 16), CD200 (SEQ ID NO: 17), CX3CL1 (SEQ ID NO: 18), TGFβ1 (SEQ ID NO: 19), and IDE1.

[0089] Activin A (SEQ ID NO: 7), as used in the present invention, means Activin beta-A chain, EDF, Erythroid differentiation protein, FRP, FSH-releasing protein, INHBA, Inhibin beta-A chain, Inhibin beta-1. The protein encoded by this gene is a member of the transforming growth factor beta (TGF-β) family of proteins produced by pluripotent stem cells, endoderm, and mesoderm.

[0090] BMP4 (SEQ ID NO: 8), as used in the present invention, means bone morphogenetic protein 4, also known as ZYME, BMP2B or BMP2B1. The protein encoded by this gene is a member of the bone morphogenetic protein family, which is part of the transforming growth factor-beta superfamily.

[0091] FGF (SEQ ID NO: 9), as used in the present invention means fibroblast growth factor. The protein encoded by this gene is a member of a family of cell signaling proteins as described in e.g. Hui et al., 2018.

[0092] VEGF-A (SEQ ID NO: 10), as used in the present invention, means vascular endothelial growth factor A also known as VPF, VEGF or MVCD1. The protein encoded by this gene is a member of the PDGF/VEGF growth factor family and a heparin-binding protein. This growth factor induces proliferation and migration of vascular endothelial cells, and is essential for both physiological and pathological angiogenesis.

[0093] LY294002, as used in the present invention, means a potent, cell permeable inhibitor of phosphatidylinositol 3-kinase (PI3K) that acts on the ATP binding site of the enzyme (Vlahos et al., 1994). The chemical structure thereof is given in the following:

[chemical structure]

[0094] CHIR99021, as used in the present invention, means an amino pyrimidine derivative that is an extremely potent inhibitor of glycogen synthase kinase 3, inhibiting GSK3β (IC₅₀=6.7 nM) and GSK3α (IC₅₀=10 nM) and functions as a WNT activator. The chemical structure thereof is given in the following:

[chemical structure]

[0095] SCF (SEQ ID NO: 11), as used in the present invention, means Stem cell factor also known as Kit ligand, Mast cell growth factor or Steel factor. The protein encoded by this gene is an early-acting cytokine that plays a pivotal role in the regulation of embryonic and adult hematopoiesis.

[0096] IL-3 (SEQ ID NO: 12), as used in the present invention, means Interleukin-3, MCGF (Mast cell growth factor), Multi-CSF, HCGF, P-cell stimulation factor, MGC79398 or MGC79399. The protein encoded by this gene is a growth promoting cytokine.

[0097] IL-6 (SEQ ID NO: 13), as used in the present invention, means Interleukin 6 also known as B-Cell Stimulatory Factor 2, CTL Differentiation Factor, Hybridoma Growth Factor, Interferon Beta-2, Interleukin-6, IFN-Beta-2, IFNB2, BSF-2, CDF, Interferon, Beta 2, B-Cell Differentiation Factor, Interferon, Beta 2, Interleukin BSF-2, BSF2, HGF, or HSF. The protein encoded by this gene is a cytokine that functions in inflammation and the maturation of B cells.

[0098] CSF1 (SEQ ID NO: 14), as used in the present invention, means Colony Stimulating Factor 1 also known as Colony Stimulating Factor 1 (Macrophage), Macrophage Colony-Stimulating Factor 1, Macrophage Colony Stimulating Factor 1, Lanimostim, CSF-1, MCSF, M-CSF and the protein encoded by this gene is a cytokine that controls the production, differentiation, and function of macrophages.

[0099] IL-34 (SEQ ID NO: 15), as used in the present invention, means Interleukin 34, also known as C16 or f77. The protein encoded by this gene is a cytokine that promotes the differentiation and viability of monocytes and macrophages through the colony-stimulating factor-1 receptor.

[0100] CSF2 (SEQ ID NO: 16), as used in the present invention, means Colony Stimulating Factor 2 also known as Sargramostim, Colony Stimulating Factor 2 (Granulocyte-Macrophage), Granulocyte-Macrophage Colony-Stimulating Factor, Molgramostin, Molgramostim, GMCSF, CSF, Granulocyte Macrophage-Colony Stimulating Factor, Granulocyte-Macrophage Colony Stimulating Factor, Colony-Stimulating Factor, GM-CSF. The protein encoded by this gene is a cytokine that controls the production, differentiation, and function of granulocytes and macrophages.

[0101] CD200 (SEQ ID NO: 17), as used in the present invention, means the CD200 Gene also known as CD200 Molecule, CD200 Antigen, Antigen Identified by Monoclonal Antibody MRC OX-2, OX-2 Membrane Glycoprotein, MOX1, MOX2, OX-2 or MRC. The protein encoded by this gene is a type I membrane glycoprotein containing two extracellular immunoglobulin domains, a transmembrane and a cytoplasmic domain.

[0102] CX3CL1 (SEQ ID NO: 18), as used in the present invention, means the CX3CL1 Gene also known as C-X3-C Motif Chemokine Ligand 1, Small Inducible Cytokine Subfamily D (Cys-X3-Cys), Member 1 (Fractalkine, Neurotactin), Chemokine (C-X3-C Motif) Ligand 1, CX3C Membrane-Anchored Chemokine, Small-Inducible Cytokine D1, C-X3-C Motif Chemokine 1, Neurotactin, Fractalkine, or SCYD1, NTT, Small Inducible Cytokine Subfamily D (Cys-X3-Cys), Member-1, C3Xkine, ABCD-3, CXC3C, CXC3, NTN or FKN. The protein encoded by this gene belongs to the CX3C subgroup of chemokines, characterized by the number of amino acids located between the conserved cysteine residues.

[0103] TGFβ1 (SEQ ID NO: 19), as used in the present invention, means the Transforming Growth Factor Beta 1, also known as Transforming Growth Factor Beta-1 Proprotein, Prepro-Transforming Growth Factor Beta-1, TGFB, Transforming Growth Factor, Beta 1, Transforming Growth Factor Beta-1, Latency-Associated Peptide, Camurati-Engelmann Disease, TGF-Beta-1, IBDIMDE, TGFbeta, DPD1, CED or LAP. The protein encoded by this gene is a secreted ligand of the TGF-beta (transforming growth factor-beta) superfamily of proteins.

[0104] In a further embodiment of the method of the present invention, the at least one growth factor is CSF1 (SEQ ID NO: 14) or IL-34 (SEQ ID NO: 15). In a further embodiment of the method of the present invention, the at least one growth factor is CSF1 (SEQ ID NO: 14). In a further embodiment of the method of the present invention, the at least one growth factor is IL-34 (SEQ ID NO: 15).

[0105] In an additional embodiment of the method of the present invention, the at least one small molecule is CHIR99021, LY294002 or IDE1.

[0106] LY294002, as used in the present invention, means a potent, cell permeable inhibitor of phosphatidylinositol 3-kinase (PI3K) that acts on the ATP binding site of the enzyme (Vlahos et al., 1994). The chemical structure thereof is given in the following:

[chemical structure]

[0107] CHIR99021, as used in the present invention, means an amino pyrimidine derivative that is a potent inhibitor of glycogen synthase kinase 3, inhibiting GSK3β (IC₅₀=6.7 nM) and GSK3α (IC₅₀=10 nM) and functions as a WNT activator. The chemical structure thereof is given in the following:

[chemical structure]

[0108] IDE1, as used in the present invention, means inducer of definitive endoderm; a small molecule that activates the TGF-beta pathway and could be used as a replacement of the growth factor TGF-beta. The chemical structure thereof is given in the following:

[chemical structure]

[0109] In another embodiment of the method of the present invention, the first and the second genomic safe harbour sites are different.

[0110] In a further embodiment of the method of the present invention, the method further comprises insertion of the coding sequence of the gene of the transcription factor CEBPB (SEQ ID NO: 3) and expression thereof.

[0111] CEBPB (SEQ ID NO: 3) as used in the present invention means CCAAT Enhancer Binding Protein Beta also known as CCAAT Enhancer Binding Protein Beta, CCAAT/Enhancer Binding Protein (C/EBP), Beta, Interleukin 6-Dependent DNA-Binding Protein, CCAAT/Enhancer-Binding Protein Beta, Nuclear Factor of Interleukin 6, Transcription Factor 5, Nuclear Factor NF-IL6, TCF5, Liver-Enriched Transcriptional Activator Protein, CCAAT/Enhancer Binding Protein Beta, Liver-Enriched Inhibitory Protein, Transcription Factor C/EBP Beta, Liver Activator Protein, C/EBP-Beta, C/EBP Beta, IL6DBP, NF-IL6, TCF-5, LAP or LIP. This intronless gene encodes a transcription factor that contains a basic leucine zipper (bZIP) domain.

[0112] In another embodiment of the method of the present invention, the method further comprises insertion of the coding sequence of the gene of the transcription factor RUNX1 (SEQ ID NO: 4) and expression thereof.

[0113] RUNX1 (SEQ ID NO: 4) as used in the present invention means Runt Related Transcription Factor 1, Runt-Related Transcription Factor 1, Polyomavirus Enhancer-Binding Protein 2 Alpha B Subunit, SL3/AKV Core-Binding Factor Alpha B Subunit, SL3-3 Enhancer Factor 1 Alpha B Subunit, Acute Myeloid Leukemia 1 Protein, Oncogene AML-1, PEBP2-Alpha B, PEA2-Alpha B, CBFA2, AML1, Core-Binding Factor Runt Domain Alpha Subunit 2 Core-Binding Factor Subunit Alpha-2, AML1-EVI-1 Fusion Protein, Acute Myeloid Leukemia, Aml1 Oncogene, CBF-Alpha-2, AML1-EVI-1, PEBP2alpha, CBF2alpha, PEBP2aB, AMLCR1 or EVI-1. The protein encoded by this gene represents the alpha subunit of CBF and is thought to be involved in the development of normal hematopoiesis.

[0114] In a further embodiment of the method of the present invention, the method further comprises insertion of the coding sequence of the gene of the transcription factor IRF8 (SEQ ID NO: 5) and expression thereof.

[0115] IRF8 (SEQ ID NO: 5) as used in the present invention means Interferon Regulatory Factor 8, also known as Interferon Consensus Sequence Binding Protein 1, H-ICSBP, ICSBP1, ICSBP, IRF-8, Interferon Consensus Sequence-Binding Protein, IMD32A, IMD32B or Interferon consensus sequence-binding protein (ICSBP). It is a transcription factor of the interferon (IFN) regulatory factor (IRF) family.

[0116] In another embodiment of the method of the present invention, the method further comprises insertion of the coding sequence of the gene of the transcription factor SALL1 (SEQ ID NO: 6) and expression thereof.

[0117] SALL1 (SEQ ID NO: 6), as used in the present invention, means Spalt Like Transcription Factor 1, also known as Zinc Finger Protein Spalt-1, Zinc Finger Protein SALL1, Zinc Finger Protein 794, Sal-Like Protein 1, ZNF794, Sal-1, Epididymis Secretory Protein Li 89, Spalt-Like Transcription Factor 1, Sal (Drosophila)-Like 1, Sal-Like 1 (Drosophila), HEL-S-89, HSAL1, HSal1, SAL1 or TBS. The protein encoded by this gene is a zinc finger transcriptional repressor and may be part of the NuRD histone deacetylase complex (HDAC).

[0118] In an additional embodiment of the method of the present invention, the transcriptional regulator protein is the reverse tetracycline transactivator (rtTA) (SEQ ID NO: 20) and the activity thereof is controlled by doxycycline or tetracycline.

[0119] As used within the present invention, the term “reverse tetracycline transactivator (rtTA)” means a transcriptional activator protein induced by tetracycline or a derivate thereof. Tetracycline-controlled transcriptional activation is a method of inducible gene expression where transcription is reversibly turned on or off in the presence of the antibiotic tetracycline or one of its derivatives (e.g. doxycycline, which is more stable). In this system, the transcriptional activator protein may be tetracycline-responsive transcriptional activator protein (rtTa) or a derivative thereof. The transcriptional regulator protein of the present invention may be an rtTA. The rtTA protein is able to bind to DNA at specific TetO operator sequences. Several repeats of such TetO sequences are placed upstream of a minimal promoter (such as the CMV promoter), which together form a tetracycline response element (TRE) (SEQ ID NO: 21). There are two forms of this system, depending on whether the addition of tetracycline or a derivative activates (Tet-On) or deactivates (Tet-Off) the rtTA protein. The Tet-ON system, in which doxycycline activates the rtTA protein, may also be used in one embodiment of the method of the present invention.

[0120] The Tet-On system is composed of two components; (1) the constitutively expressed tetracycline-responsive transcriptional activator protein (rtTA) and the rtTA sensitive inducible promoter (Tet Responsive Element, TRE). This may be bound by tetracycline or its more stable derivatives, including doxycycline (dox), resulting in activation of rtTA, allowing it to bind to TRE sequences and inducing expression of TRE-controlled genes. The use of this may be preferred in the method of the present invention. Thus, the transcriptional regulator protein of the method of the present invention may be the tetracycline-responsive transcriptional activator protein (rtTA), which can be activated or deactivated by the antibiotic tetracycline or one of its derivatives, which are supplied exogenously. If the transcriptional regulator protein is rtTA, then the inducible promoter inserted into the second GSH site includes the tetracycline response element (TRE). The exogenously supplied substance may be the antibiotic tetracycline or one of its derivatives, like doxycycline, preferably tetracycline or doxycycline.

[0121] Variants and modified rtTA proteins may be used in the method of the present invention. These may include Tet-On Advanced transactivator (also known as rtTA2S-M2) and Tet-On 3G (also known as rtTA-V16, derived from rtTA2S-S2).

[0122] In another embodiment of the method of the present invention, the inducible promoter includes a Tet Responsive Element (TRE) (SEQ ID NO: 21).

[0123] As used within the present invention, the term “Tet Responsive Element (TRE)” means a bacterial TetO sequence of 7 repeats of 19 bp separated by spacer sequences, together with a minimal promoter. Variants and modifications of the TRE sequence are possible, since the minimal promoter can be any suitable promoter. Preferably, the minimal promoter shows no or minimal expression levels in the absence of rtTA binding. The inducible promoter inserted into the second GSH may thus comprise a TRE. The basic genetic principal underlying the present invention is also depicted in FIG. 2, showing the different GSH sites (hROSA26 and AAVS1), and the integrated rtTA (SEQ ID NO: 20) and TRE (SEQ ID NO: 21).

[0124] In a further embodiment of the method of the present invention, said first and said second genomic safe harbour sites are selected from the group consisting of the hROSA26 locus (SEQ ID NO: 22), the AAVS1 locus (SEQ ID NO: 23), the CLYBL gene (SEQ ID NO: 24), the CCR5 gene (SEQ ID NO. 25), the HPRT gene (SEQ ID NO. 26) or genes with the site ID 325 on chromosome 8 (SEQ ID NO: 27), site ID 227 on chromosome 1 (SEQ ID NO: 28), site ID 229 on chromosome 2 (SEQ ID NO: 29), site ID 255 on chromosome 5 (SEQ ID NO: 30), site ID 259 on chromosome 14 (SEQ ID NO: 31), site ID 263 on chromosome X (SEQ ID NO: 32), site ID 303 on chromosome 2 (SEQ ID NO: 33), site ID 231 on chromosome 4 (SEQ ID NO: 34), site ID 315 on chromosome 5 (SEQ ID NO: 35), site ID 307 on chromosome 16 (SEQ ID NO: 36), site ID 285 on chromosome 6 (SEQ ID NO: 37), site ID 233 on chromosome 6 (SEQ ID NO: 38), site ID 311 on chromosome 134 (SEQ ID NO: 39), site ID 301 on chromosome 7 (SEQ ID NO: 40), site ID 293 on chromosome 8 (SEQ ID NO: 41), site ID 319 on chromosome 11 (SEQ ID NO: 42), site ID 329 on chromosome 12 (SEQ ID NO: 43), site ID 313 on chromosome X (SEQ ID NO: 44). Preferably, in a further embodiment of the method of the present invention, said first and said second genomic safe harbour sites are selected from the group consisting of the hROSA26 locus (SEQ ID NO: 22), the AAVS1 locus (SEQ ID NO: 23), the CLYBL gene (SEQ ID NO: 24), the CCR5 gene (SEQ ID NO. 25), the HPRT gene (SEQ ID NO. 26). More preferably, said first and said second genomic safe harbour sites are selected from the group consisting of the hROSA26 locus (SEQ ID NO: 22) and the AAVS1 locus (SEQ ID NO: 23).

[0125] Further sites may be identified by looking for sites where viruses naturally integrate without disrupting natural gene expression. For the method of the present invention, several GSH sites may be used, which will be described in more detail in the following.

[0126] The adeno-associated virus integration site 1 locus (AAVS1) (SEQ ID NO: 23) is located within the protein phosphatase 1, regulatory subunit 12C (PPP1R12C) gene on human chromosome 19, which is expressed uniformly and ubiquitously in human tissues. This site serves as a specific integration locus for AAV serotype 2, and thus was identified as a possible GSH. AAVS1 has been shown to be a favourable environment for transcription, since it comprises an open chromatin structure and native chromosomal insulators that enable resistance of the inducible cassettes against silencing. There are no known adverse effects on a cell resulting from disruption of the PPP1R12C gene. Moreover, an inducible cassette inserted into this site remains transcriptionally active in many diverse cell types. AAVS1 is thus considered to be a GSH and has been widely utilized for targeted transgenesis in the human genome.

[0127] The hROSA26 site (SEQ ID NO: 22) has been identified on the basis of sequence analogy with a GSH from mice (ROSA26-reverse oriented splice acceptor site #26). Although the orthologue site has been identified in humans, this site is not commonly used for inducible cassette insertion. The inventors of the present invention have used a targeting system specifically for the hROSA26 site and thus were able to insert genetic material into this locus. The hROSA26 locus (SEQ ID NO: 22) is on chromosome 3 (3p25.3), and can be found within the Ensembl database (GenBank: CR624523). The exact genomic co-ordinates of the integration site are 3:9396280-9396303: Ensembl. The integration site lies within the open reading frame (ORF) of the THUMPD3 long non-coding RNA (reverse strand). Since the hROSA26 site has an endogenous promoter, the inserted genetic material may take advantage of that endogenous promoter, or alternatively, may be inserted operably linked to a promoter.

[0128] Intron 2 of the Citrate Lyase Beta-like (CLYBL) gene (SEQ ID NO: 24), on the long arm of Chromosome 13, was identified as a suitable GSH since it is one of the identified integration hot-spots of the phage derived phiC31 integrase. Studies have demonstrated that randomly inserted inducible cassettes into this locus are stable and expressed. It has been shown that insertion of inducible cassettes at this GSH does not perturb local gene expression (Cerbibi et al., 2015). CLYBL thus provides a GSH which may be used in the method of the present invention.

[0129] CCR5 (SEQ ID NO: 25), which is located on chromosome 3 (position 3p21.31) is a gene, which codes for HIV-1 major co-receptor. Interest in the use of this site as a GSH arises from the null mutation in this gene that appears to have no adverse effects, but predisposes to HIV-1 infection resistance. Zinc-finger nucleases that target the third exon have been developed, thus allowing for insertion of genetic material at this locus. Given that the natural function of CCR5 has yet to be elucidated, the site remains a putative GSH, which may be used in the method of the present invention. The hypoxanthine-guanine phosphoribosyl transferase (HPRT) gene encodes a transferase enzyme that plays a central role in the generation of purine nucleotides through the purine salvage pathway. It has been mooted as a GSH site. Insertions at this site may be more applicable for mature cell types, such as modification for gene therapy. GSH in other organisms have been identified and include ROSA26, HRPT and HippII (HII) loci in mice.

[0130] Mammalian genomes may include GSH sites based upon pseudo attP sites. For such sites, hiC31 integrase, the Streptomyces phage-derived recombinase, has been developed as a non-viral insertion tool, because it has the ability to integrate an inducible cassette-containing plasmid carrying an attB site into pseudo attP sites. GSH are also present in the genomes of plants, and modification of plant cells can be used in the method of the present invention. GSH have been identified in the genomes of rice (Cantos et al., 2014).

[0131] The following SHS sites may be used in any of the methods of the present invention. They were published by Pellenz et al., 2019, and fulfil five out of nine criteria listed above: Site ID 325 on chromosome 8:68,720, 172-68,720,191 (SEQ ID NO: 27); site ID 227 on chromosome 1:231,999,396-231,999,415 (SEQ ID NO: 28); site ID 229 on chromosome 2:45,708,354-45,708,373 (SEQ ID NO: 29); site ID 255 on chromosome 5:19,069,307-19,069,326 (SEQ ID NO: 30); site ID 259 on chromosome 14:92,099,558-92,099,577 (SEQ ID NO: 31); site ID 263 on chromosome X: 12,590,812-12,590,831 (SEQ ID NO: 32); site ID 303 on chromosome 2:77,263,930-77,263,949 (SEQ ID NO: 33); site ID 317 on chromosome 2:77,263,930-77,263,949 (SEQ ID NO: 60); site ID 231 on chromosome 4:58,976,613-58,976,632 (SEQ ID NO: 34); site ID 315 on chromosome 5:7,577,728-7,577,747 (SEQ ID NO: 35); site ID 307 on chromosome 16:19,323,777-19,323,796 (SEQ ID NO: 36); site ID 285 on chromosome 6:89,574,320-89,574,339 (SEQ ID NO: 37); site ID 233 on chromosome 6:114,713,905-114,713,924 (SEQ ID NO: 38); site ID 311 on chromosome 6:134,385,946-134,385,965 (SEQ ID NO: 39); site ID 301 on chromosome 7:113,327,685-113,327,704 (SEQ ID NO: 40); site ID 293 on chromosome 8:40,727,927-40,727,946 (SEQ ID NO: 41); site ID 319 on chromosome 11:32,680,546-32,680,565 (SEQ ID NO: 42); site ID 329 on chromosome 12:126, 152,581-126,152,600 (SEQ ID NO: 43); and site ID 313 on chromosome X:16,059,732-16,059,751 (SEQ ID NO: 44).

[0132] In another embodiment of the method of the present invention, said stem cell is a pluripotent stem cell, an induced pluripotent stem cell (iPSC), a neural progenitor cell, hematopoietic stem cell or an embryonic stem cell (ESC).

[0133] Within the present invention, the term “pluripotent stem cell” is used as defined above.

[0134] As used within the present invention, the term “neural progenitor cell” means a multipotent cell state between pluripotent stem cell and mature somatic cell. This cell state is usually determined to become a specialized cell type like neurons, oligodendrocytes and astrocytes.

[0135] Within the present invention, the term “induced pluripotent stem cell (iPSC)” is used as defined above.

[0136] As used within the present invention, the term “hematopoietic stem cell” means a blood forming stem cell. This special type of multipotent stem cell is able to form any type of blood cell, but lost the capacity to form other cell types.

[0137] Within the present invention, the term “embryonic stem cell (ESC)” is used as defined above.

[0138] In a further embodiment of the method of the present invention, said stem cell is a human or a mouse stem cell.

[0139] As used within the present invention, the term “human or a mouse stem cell” means a cell originated from human or mouse. However, the stem cell used in the method of the present invention may be any human or animal cell. It is preferably a mammalian cell, such as a cell from a rodent, such as mice and rats; marsupial such as kangaroos and koalas; non-human primate such as a bonobo, chimpanzee, lemurs, gibbons and apes; camelids such as camels and llamas; livestock animals such as horses, pigs, cattle, buffalo, bison, goats, sheep, deer, reindeer, donkeys, bantengs, yaks, chickens, ducks and turkeys; domestic animals, such as cats, dogs, rabbits and guinea pigs. The cell is preferably a human cell. In certain aspects, the cell is preferably one from a livestock animal. The type of cell used in the method of the present invention will depend upon the application of the cell once insertion of the genetic material into the GSH sites is complete.

[0140] The present invention also relates to a microglia cell obtained by any of the methods according to the present invention, preferably wherein the microglia expresses at least one microglia surface protein selected from the group consisting of ITGAM (CD11B) (SEQ ID NO: 45), ITGAX (CD11C) (SEQ ID NO: 46), CD14 (SEQ ID NO: 47), CD16 (SEQ ID NO: 48), ENTPD1 (CD39) (SEQ ID NO: 49), PTPRC (CD45) (SEQ ID NO: 50), CD68 (SEQ ID NO: 51), CSF1R (CD115) (SEQ ID NO: 52), CD163 (SEQ ID NO: 53), CX3CR1 (SEQ ID NO: 54), TREM2 (SEQ ID NO: 55), P2RY12 (SEQ ID NO: 56), TMEM119 (SEQ ID NO: 57), and HLA-DR (SEQ ID NO: 58).

[0141] Thus, microglia are additionally defined by expressing at least one of the following surface proteins ITGAM (CD11B) (SEQ ID NO: 45), ITGAX (CD11C) (SEQ ID NO: 46), CD14 (SEQ ID NO: 47), CD16 (SEQ ID NO: 48), ENTPD1 (CD39) (SEQ ID NO: 49), PTPRC (CD45) (SEQ ID NO: 50), CD68 (SEQ ID NO: 51), CSF1R (CD115) (SEQ ID NO: 52), CD163 (SEQ ID NO: 53), CX3CR1 (SEQ ID NO: 54), TREM2 (SEQ ID NO: 55), P2RY12 (SEQ ID NO: 56), TMEM119 (SEQ ID NO: 57), and HLA-DR (SEQ ID NO: 58). These proteins are defined as follows.

[0142] ITGAM (CD11B), as used in the present invention, means Integrin Subunit Alpha M, a gene which encodes the integrin alpha M chain. Integrins are heterodimeric integral membrane proteins composed of an alpha chain and a beta chain. The protein sequence thereof is given in SEQ ID NO: 45.

[0143] ITGAX (CD11C), as used within the present invention, means Integrin Subunit Alpha X, and the gene encodes the integrin alpha X chain protein. The protein sequence thereof is given in SEQ ID NO: 46.

[0144] CD14, as used in the present invention, means Monocyte Differentiation Antigen CD14 and the protein encoded by this gene is a surface antigen that is preferentially expressed on monocytes/macrophages. The protein sequence thereof is given in SEQ ID NO: 47.

[0145] CD16, as used in the present invention, means FCGR3A Fc Fragment of IgG Receptor Illa and this gene encodes a receptor for the Fc portion of immunoglobulin G, and it is involved in the removal of antigen-antibody complexes from the circulation, as well as other antibody-dependent responses. The protein sequence thereof is given in SEQ ID NO: 48.

[0146] ENTPD1 (CD39), as used in the present invention, means Ectonucleoside Triphosphate Diphosphohydrolase 1 and the protein encoded by this gene is a plasma membrane protein that hydrolyzes extracellular ATP and ADP to AMP. The protein sequence thereof is given in SEQ ID NO: 49.

[0147] PTPRC (CD45), as used in the present invention, means Protein Tyrosine Phosphatase Receptor Type C and the protein encoded by this gene is a member of the protein tyrosine phosphatase (PTP) family. The protein sequence thereof is given in SEQ ID NO: 50.

[0148] CD68, as used in the present invention, means CD68 Antigen and this gene encodes a 110-kD transmembrane glycoprotein that is highly expressed by human monocytes and tissue macrophages. The protein sequence thereof is given in SEQ ID NO: 51.

[0149] CSF1R (CD115), as used in the present invention, means Colony Stimulating Factor 1 Receptor and the protein encoded by this gene is the receptor for colony stimulating factor 1, a cytokine which controls the production, differentiation, and function of macrophages. The protein sequence thereof is given in SEQ ID NO: 52.

[0150] CD163, as used in the present invention, means CD163 Antigen and the protein encoded by this gene is a member of the scavenger receptor cysteine-rich (SRCR) superfamily, and is exclusively expressed in monocytes and macrophages. The protein sequence thereof is given in SEQ ID NO: 53.

[0151] CX3CR1, as used in the present invention, means C-X3-C Motif Chemokine Receptor 1 and the protein encoded by this gene is a receptor for fractalkine. The protein sequence thereof is given in SEQ ID NO: 54. Fractalkine is a transmembrane protein and chemokine involved in the adhesion and migration of leukocytes.

[0152] TREM2, as used in the present invention, means Triggering Receptor Expressed On Myeloid Cells 2 and this gene encodes a membrane protein that forms a receptor signaling complex with the TYRO protein tyrosine kinase binding protein. The protein sequence thereof is given in SEQ ID NO: 55.

[0153] P2RY12, as used in the present invention, means Purinergic Receptor P2Y12 and the product of this gene belongs to the family of G-protein coupled receptors. The protein sequence thereof is given in SEQ ID NO: 56.

[0154] TMEM119, as used in the present invention, means Transmembrane Protein 119, which is a protein coding gene. Among its related pathways are microglia activation during neuroinflammation. The protein sequence thereof is given in SEQ ID NO: 57.

[0155] HLA-DR, as used in the present invention, means Major Histocompatibility Complex, Class II, DR Alpha and Beta and both HLA-DRA and HLA-DRB1 are HLA class II alpha chain paralogues. The protein sequence thereof is given in SEQ ID NO: 58.

[0156] In a further embodiment, the present invention also comprises the microglia cell according to the present invention for use in therapy.

[0157] As used in the present invention, the term “therapy” means any form of treatment of diseases or unwanted health status of organisms, animals or human beings. It may also include gene therapy. This may be defined as the intentional insertion of foreign DNA into the nucleus of a cell with therapeutic intent. Such a definition includes the provision of a gene or genes to a cell to provide a wild type version of a faulty gene, the addition of genes for RNA molecules that interfere with target gene expression (which may be defective), provision of suicide genes (such as the enzymes herpes simplex virus, thymidine kinase (HSV-tk) and cytosine deaminase (CD), which convert the harmless prodrug ganciclovir (GCV) into a cytotoxic drug, DNA vaccines for immunization or cancer therapy (including cellular adoptive immunotherapy) and any other provision of genes to a cell for therapeutic purposes. Additionally, the mature microglia may be used directly for transplantation into a human or animal body. Alternatively, the microglia may form a test material for research, including the effects of drugs on gene expression and the interaction of drugs with a particular gene. The microglia for research can involve the use of an inducible cassette with a genetic sequence of unknown function, in order to study the controllable expression of that genetic sequence. Additionally, it may enable the microglia to be used to produce large quantities of desirable materials, such as growth factors or cytokines.

[0158] Further, the present invention is also directed in one embodiment to the use of such a microglia cell according to the present invention for in vitro diagnostics of a disease. Preferably, the disease is selected from the group consisting of diseases of the central nervous system, preferably neurodegenerative diseases; more preferably Alzheimer's disease, Parkinson's disease, frontotemporal dementia or Amyotrophic Lateral Sclerosis; neuroinflammatory or autoimmune diseases, preferably Multiple Sclerosis, auto-antibody-mediated encephalitis or infectious diseases, neurovascular diseases; preferably stroke, vasculitis; traumatic brain injury, and cancer.

[0159] Further, the present invention is directed to the use of such a microglia cell according to the present invention for in vitro culturing with brain organoids.

[0160] As used within the present invention, the term “organoid” means (mostly stem) cell-derived in vitro 3D-organ models and represent in combination with the microglia produced according to this invention a powerful tool for medical diagnostics to study the involvement and interaction of microglia with other cells of the brain.

[0161] It is noted that as used herein, the singular forms “a”, “an”, and “the”, include plural references unless the context clearly indicates otherwise. Thus, for example, reference to “a reagent” includes one or more of such different reagents and reference to “the method” includes reference to equivalent steps and methods known to those of ordinary skill in the art that could be modified or substituted for the methods described herein.

[0162] Unless otherwise indicated, the term “at least” preceding a series of elements is to be understood to refer to every element in the series. The term “at least one” refers, if not particularly defined differently, to one or more such as two, three, four, five, six, seven, eight, nine, ten or more. Those skilled in the art will recognize, or be able to ascertain using no more than routine experimentation, many equivalents to the specific embodiments of the invention described herein. Such equivalents are intended to be encompassed by the present invention.

[0163] The term “and/or” wherever used herein includes the meaning of “and”, “or” and “all or any other combination of the elements connected by said term”.

[0164] The term “less than” or in turn “more than” does not include the concrete number.

[0165] For example, less than 20 mean less than the number indicated. Similarly, “more than” or “greater than” means more than or greater than the indicated number, e.g. more than 80% means more than or greater than the indicated number of 80%.

[0166] Throughout this specification and the claims which follow, unless the context requires otherwise, the word “comprise”, and variations such as “comprises” and “comprising”, will be understood to imply the inclusion of a stated integer or step or group of integers or steps, but not the exclusion of any other integer or step or group of integer or step. When used herein the term “comprising” can be substituted with the term “containing” or “including” or sometimes when used herein with the term “having”. When used herein “consisting of” excludes any element, step, or ingredient not specified.

[0167] The term “including” means “including but not limited to”. “Including” and “including but not limited to” are used interchangeably.

[0168] The term “about” means plus or minus 10%, preferably plus or minus 5%, more preferably plus or minus 2%, most preferably plus or minus 1%.

[0169] Throughout the description and claims of this specification, the singular encompasses the plural unless the context otherwise requires. In particular, where the indefinite article is used, the specification is to be understood as contemplating plurality as well as singularity, unless the context requires otherwise.

[0170] It should be understood that this invention is not limited to the particular methodology, protocols, material, reagents, and substances, etc., described herein and as such can vary. The terminology used herein is for the purpose of describing particular embodiments only, and is not intended to limit the scope of the present invention, which is defined solely by the claims.

[0171] All publications cited throughout the text of this specification (including all patents, patent application, scientific publications, instructions, etc.), whether supra or infra, are hereby incorporated by reference in their entirety. Nothing herein is to be construed as an admission that the invention is not entitled to antedate such disclosure by virtue of prior invention. To the extent the material incorporated by reference contradicts or is inconsistent with this specification, the specification will supersede any such material.

[0172] The content of all documents and patent documents cited herein is incorporated by reference in their entirety.

[0173] A better understanding of the present invention and of its advantages will be gained from the following examples, offered for illustrative purposes only. The examples are not intended to limit the scope of the present invention in any way.

### EXAMPLES OF THE INVENTION

[0174] The following Examples illustrate the invention, but are not to be construed as limiting the scope of the invention.

### Example 1

### Material and Methods

[0175] For initial screening experiments, first an hROSA-CAG-rtTA hiPSC-line (nucleofection of three plasmids expressing a CAS9-nickase, two hROSA26-specific guideRNAs (SEQ ID NO: 66 and SEQ ID NO: 67) and the donor plasmid with the CAG-rtTA expression cassette as demonstrated in FIG. 2A and FIG. 4A; antibiotic selection, clonal expansion and characterization of individual clonal hiPSC-colonies) was generated and subsequent transient transfection of the four AAVS1 targeting vectors (SEQ ID NOs: 61 to SEQ ID NO: 64) (see also FIG. 4B-E) was performed allowing for quick overexpression of PU.1 (SEQ ID NO: 2) either alone or in combination with either of the three other transcription factors RUNX1 (SEQ ID NO: 4), CEBPB (SEQ ID NO: 3), or IRF8 (SEQ ID NO: 5) in the form of a bi-cistronic expression cassette (FIG. 4B-E) (SEQ ID NO: 61 to SEQ ID NO. 64). For screening purpose, targeted cells were not clonally expanded, resulting in overexpression only in a subset of cells.

[0176] Surprisingly, initial screening experiments demonstrated rapid induction of myeloid and microglia lineage marker in all three cell lines expressing PU.1 (SEQ ID NO: 2) plus any of the other three candidate reprogramming factors, but not in wild-type control hiPSCs or in cells expressing PU.1 (SEQ ID NO: 2) alone.

### Description

[0177] To develop a prototype protocol and establish suitable read-out parameters, the inventors decided to focus on the combinatorial overexpression of PU.1 (SEQ ID NO: 2) and CEBPB (SEQ ID NO: 3). Thus, fully verified dual GSH targeted inducible PU.1+CEBPB hiPSCs were created and clonally expanded.

### Observation

[0178] Addition of doxycycline resulted in the rapid loss of expression of the pluripotency markers OCT4 (SEQ ID NO: 78) and NANOG (SEQ ID NO: 79) and induction of both transgenes in all cells (see FIG. 6).

### Example 2

### Material and Methods

[0179] In brief, hiPSCs were plated as single cells onto Matrigel in pluripotency maintenance medium. After two days, the media is changed to Dulbecco's modified eagle medium (DMEM)/F12 supplemented with dox for transgene induction plus small molecules and growth factors mimicking the sequence of embryonic events outlined above. After three days of induction, the adherent cells started to delaminate from the tissue culture plate and were found as floating single cells in the supernatant.

### Description

[0180] Subsequently, the inventors performed longer screening experiments in which cells were induced for up to 20 days for optimisation of media compositions. Multi-colour flow cytometry demonstrated a remarkably robust and rapid induction of myeloid cell surface markers that were chosen as screening panel for the induction of primitive macrophages and/or microglia (CD11b (SEQ ID NO: 45), CD14 (SEQ ID NO: 47), CD45 (SEQ ID NO: 50), CD163 (SEQ ID NO: 53), CX3CR1 (SEQ ID NO: 54)). The inventors also noted important culture condition-dependent differences: Induction occurred most rapidly and efficiently when the transcription factor overexpression was performed in conjunction with timed exposure to extracellular cues (small molecules, growth factors) mimicking the sequence of embryonic development: (1) patterning of the pluripotent epiblast (hiPSCs) towards (posterior primitive streak) extra-embryonic mesoderm and the haemangioblast, (2) induction of primitive haematopoiesis and early macrophage precursors, (3) differentiation into primitive yolk sac macrophages, (4) differentiation into microglia (see FIG. 5).

### Observation

[0181] The cells rapidly started to express typical myeloid surface proteins including CD45 (SEQ ID NO: 50) (also known as PTPRC), CD11b (SEQ ID NO: 45) (also known as ITGAM), CD14 (SEQ ID NO: 47), and CX3CR1 (SEQ ID NO: 54) as demonstrated by flow cytometry (see FIG. 5B-C). By day 10, all cells had transitioned into the supernatant and were plated down onto poly-L-lysine (PLL) coated tissue culture dishes in final, chemically-defined microglia differentiation and maintenance medium, according to Muffat et al., 2016. Interestingly, differentiation into microglia occurred even more efficiently when doxycycline was withdrawn after day ten of the induction protocol, thus unequivocally demonstrating the independence of the cellular phenotype from continued transgene expression.

[0182] After 6-10 days of transgene-free differentiation and maturation in adhesion culture, virtually all cells expressed a wide range of common myeloid and more microglia specific proteins, including CD39 (SEQ ID NO: 49), P2RY12 (SEQ ID NO: 56), TREM2 (SEQ ID NO: 55), and TMEM119 (SEQ ID NO: 57) as quantified by flow cytometry (see FIG. 5C) or demonstrated by immunocytochemistry (see FIG. 5D). Next, co-culture experiments were performed in which the inventors plated microglia precursors onto a pure population of isogenic hiPSC-derived cortical neurons generated according to previously published protocol according to Zhang et al., 2013, and Pawlowski et al., 2017. Microglial cells acquired a more ramified (i.e. less activated) morphology compared to cells in monoculture (see FIG. 5E). Real-time qPCR analysis of hiPSCs and microglia in monoculture demonstrated downregulation of pluripotency factors, MYB-independence (in line with the primitive yolk sac macrophage origin of microglia), and high expression of core microglia transcription factors, classical surface markers, and recently suggested unique microglial signature genes (see FIG. 5F).

### REFERENCES

[0183] Abud E M, Ramirez R N, Martinez E S, Healy L M, Nguyen C H H, Newman S A, Yeromin A V, Scarfone V M, Marsh S E, Fimbres C, et al.: iPSC-Derived Human Microglia-like Cells to Study Neurological Diseases. Neuron, 2017, 94:278-293.e9.
[0184] Butovsky O, Weiner H L: Microglial signatures and their role in health and disease. Nat Rev Neurosci., 2018, 19.
[0185] Cantos C, Francisco P, Trijatmiko K R, Slamet-Loedin I and Chadha-Mohanty P K: Identification of “safe harbor” loci in indica rice genome by harnessing the property of zinc-finger nucleases to induce DNA damage and repair. Frontier in Plant Science, 2014, 5:302, pp. 1-8.
[0186] Cerbini T, Funahashi R, Luo Y, Liu C, Park K, Rao M, Malik N, Zou J: Transcription Activator-Like Effector Nuclease (TALEN)-Mediated CLYBL Targeting Enables Enhanced Transgene Expression and One-Step Generation of Dual Reporter Human Induced Pluripotent Stem Cell (iPSC) and Neural Stem Cell (NSC) Lines. Plos One, 2015.
[0187] Chung Y, Klimanskaya I, Becker S, Li T, Maserati M, Lu S, Zdravkovic T, Ilic D, Genbacev O, Fisher S, Krtolica A, and Lanza R: Human Embryonic Stem Cell Lines Generated without Embryo Destruction. 2008, Cell Stem Cell, 2 (2) pp. 113-117.
[0188] Cohen D E, Melton D A: Turning straw into gold: directing cell fate for regenerative medicine. Nat Rev Genet 2011, 12:243-52.
[0189] Douvaras P, Sun B, Wang M, Kruglikov I, Lallos G, Zimmer M, Terrenoire C, Zhang B, Gandy S, Schadt E, et al.: Directed Differentiation of Human Pluripotent Stem Cells to Microglia. Stem cell reports, 2017, 8:1516-1524.
[0190] Gaj, T, Gersbach, C A, Barbas, C F: ZFN, TALEN, and CRISPR/Cas-based methods for genome engineering, Trends Biotechnol., 2013, 31 (7): 397-405.
[0191] Ginhoux F, Greter M, Leboeuf M, Nandi S, See P, Gokhan S, Mehler M F, Conway S J, Ng L G, Stanley E R, et al.: Fate mapping analysis reveals that adult microglia derive from primitive macrophages. Science, (80) 2010, 330:841-5.
[0192] Gomez Perdiguero E, Klapproth K, Schulz c, Busch K, Azzoni E, Crozet L, Garner H, Trouillet C, de Bruijn M F, Geissmann F, et al.: Tissueresident macrophages originate from yolk-sac-derived erythro-myeloid progenitors. Nature 2015, 518:547-51.
[0193] Haenseler W, Sansom S N, Buchrieser J, Newey S E, Moore C S, Nicholls F J, Chintawar S, Schnell C, Antel J P, Allen N D, et al.: A Highly Efficient Human Pluripotent Stem Cell Microglia Model Displays a Neuronal-Co-culture-Specific Expression Profile and inflammatory Response. Stem cell reports 2017, 8:1727-1742.
[0194] Hagan C E, Bolon B and Keene C D, Comparative Anatomy and Histology, 2012, pages 339-394.
[0195] Keren-Shaul H, Spinrad A, Weiner A, Matcovitch-Natan O, Dvir-Szternfeld R, Ulland T K, David E, Baruch K, Lara-Astaiso D, Toth B, et al.: A unique Microglia Type Associated with Restricting Development of Alzheimer's Disease. Cell, 2017, 169:1276-1290.e17.
[0196] Kettenmann H, Hanisch U-K, Noda M, Verkhralsky A: Physiology of microglia. Physiol Rev., 2011, 91:461-553.
[0197] Krasemann S, Madore C, Cialic R, Baufeld C, Calcagno N, El Fatimy R, Beckers L, O'Loughlin E, Xu Y, Fanek Z, et al.: The TREM2-APOE Pathway Drives the Transcriptional Phenotype of Dysfunctional Microglia in Neurodegenerative Diseases. Immunity, 2017, 17:566581.e9.
[0198] Ladewig J, Koch P, Brustle O: Leveling Waddington: the emergence of direct programming and the loss of cell fate hierarchies. Nat Rev Mol Cell Biol, 2013, 14:225-36.
[0199] McGrath K E, Koniski A D, Malik J, Palis J: Circulation is established In a stepwise pattern in the mammalian embryo. Blood, 2003, 101:1669-76.
[0200] Muffat J, Li Y, Yuan B, Mitalipova M, Omer A, Corcoran S, Bakiasi c, Tsai L-H, Aubourg P, Ransohoff R M, et al.: Efficient derivation of microglia-like cells from human pluripotent stem cells. Nat Med, 2016, 22:1355-1367.
[0201] Pandya H, Shen M J, Ichikawa D M, Sedlock A B, Choi Y, Johnson K R, Kim G, Brown M A, Elkahloun A G, Maric D, et al.: Differentiation of human and murine induced pluripotent stem cells to microglia-like cells. Nat Neurosci, 2017, 20:753-759.
[0202] Pawlowski M, Ortmann D, Bertero A, Tava.es J M, Pedersen R A, Vallier L, Kotter M R N: Inducible and Deterministic Forward Programming of Human Pluripotent Stem Cells into Neurons, Skeletal Myocytes, and Oligodendrocytes. Stem cell reports, 2017, 8: 80H12.
[0203] Pellenz S, Phelps M, Tang W, Hovde T B, Sinit R B, Fu W, Li H, Chen E and Monnat, Jr. R J: New human chromosomal sites with ‘safe harbor’ potential for targeted transgene insertion. Human Gene Therapy, 2019, 1-47.
[0204] Qi Hui, Zi Jin, Xiaokun Li, Changxiao Liu and Xiaojie Wang: FGF Family: From Drug Development to Clinical Application. Int. J. Mol. Sci., 2018, 19 (7), 1875.
[0205] Ransohoff R M: How neuroinflammation contributes to neurodegeneration. Science, (80-) 2016, 353:777-83.
[0206] Réu P, Khosravi A, Bernard S, Mold J E, Salehpour M, Alkass K, Perl S, Tisdale J, Possnert G, Druid H, et al.: The Lifespan and Turnover of Microglia in the Human Brain. Cell Rep, 2017, 20: 77V784.
[0207] Schafer D P, Stevens B: Microglia Function in Central Nervous System Development and Plasticity. Cold Sping Harb Perspect Biol, 2015, 7: a020545.
[0208] Takahashi K, Tanabe K, Ohnuki M, Narita M, Ichisaka T, Tomoda K, Yamanaka S: Induction of pluripotent stem cells from adult human fibroblasts by defined factors. Cell, 2007, 131:861-72.
[0209] Takata K, Kozaki T, Lee CZW, Thion M S, Otsuka M, Lim S, Utami K H, Fidan K, Park D S, Malleret B, et al.: Induced-Pluripotent-Stem-Cell-Derived Primitive Macrophages Provide a Platform for Modelling Tissue-Resident Macrophage Differentiation and Function. Immunity, 2017, 47:1 83-1 98.e6.
[0210] Thomson J A, Itskovitz-Eldor J, Shapiro S S, Waknitz M A, Swiergiel J J, Marshall V S, Jones J M: Embryonic stem cell lines derived from human blastocysts. Science, (80-) 1998, 282:1145-7.
[0211] Vlahos C J, Matter W F, Hui K Y, and Brown R F: A Specific Inhibitor of Phosphatidylinositol 3-Kinase, 2-(4-Morpholinyl)-8-phenyl-4H-I-benzopyran-4-one (LY294002). The Journal of Biological Chemistry, 1994, 269 (7), pp. 5241-5248.
[0212] ZhangY, Pak C, Han Y, Ahlenius H, ZhangZ, Chanda S, Marro S, Patzke C, Acuna c, Covy J, et al.: Rapid single-step induction of functional neurons from human pluripotent stem cells. Neuron, 2013, 78:785-98.

1. A cell, comprising: a modified genome comprising inserted coding sequence(s) of a set of transcription factors comprising Hematopoietic Transcription Factor PU.1 (PU.1) in combination with at least one of Runt Related Transcription Factor 1 (RUNX1), CCAAT Enhancer Binding Protein (CEBP), or Interferon Regulatory Factor 8 (IRF8).

2. The cell of claim 1, wherein the cell further comprises a nucleotide sequence encoding a transcriptional regulator protein.

3. The cell of claim 2, wherein the transcriptional regulator protein is a reverse tetracycline transactivator (rtTA), and activity of the rtTA is controlled by doxycycline or tetracycline.

4. The cell of claim 2, wherein the coding sequence(s) are operably linked to an inducible promoter, which is regulated by the transcriptional regulator protein.

5. The cell of claim 4, wherein the inducible promoter comprises a Tet Responsive Element (TRE).

6. The cell of claim 1, wherein the cell is a pluripotent stem cell.

7. The cell of claim 6, wherein the pluripotent stem cell is an induced pluripotent stem cell or embryonic stem cell.

8. The cell of claim 1, wherein the cell is a human cell or a mouse cell.

9. The cell of claim 1, wherein the PU.1 coding sequence comprises the nucleic acid sequence according to SEQ ID NO: 1.

10. The cell of claim 1, wherein the PU.1 comprises the amino acid sequence according to SEQ ID NO: 2.

11. The cell of claim 1, wherein the CEBP is CEBPB.

12. The cell of claim 11, wherein the CEBPB coding sequence comprises the nucleic acid sequence according to SEQ ID NO: 3.

13. The cell of claim 1, wherein the RUNX1 coding sequence comprises the nucleic acid sequence according to SEQ ID NO: 4.

14. The cell of claim 1, wherein the IRF8 coding sequence comprises the nucleic acid sequence according to SEQ ID NO: 5.

15. The cell of claim 1, wherein the set of transcription factors comprises PU.1 and CEBP.

16. The cell of claim 3, wherein the nucleotide sequence encoding the rtTA comprises the nucleic acid sequence according to SEQ ID NO: 20.

17. The cell of claim 5, wherein the TRE comprises the nucleic acid sequence according to SEQ ID NO: 21.

18. The cell of claim 1, wherein the cell is a microglial cell.

19. The cell of claim 18, wherein the microglial cell further expresses a microglia surface protein selected from the group consisting of: ITGAX, CD14, CD16, ENTPD1, PTPRC, CD68, CSF1R, CD163, CX3CR1, TREM2, P2RY12, TMEM119, and HLA-DR.

20. The cell of claim 18, wherein the microglial cell further expresses CD68 and/or IBA1.

21. A method of treating a subject having or at risk of a disease or disorder comprising administering to the subject a therapeutically effective amount of the cell of claim 1.

22. The method of claim 21, wherein the disease or disorder is a disease of the central nervous system selected from the group consisting of: Alzheimer's disease, Parkinson's disease, frontotemporal dementia, amyotrophic lateral sclerosis, multiple sclerosis, auto-antibody-mediated encephalitis, stroke, vasculitis, traumatic brain injury, and cancer.

The application's sequence listing, which the Patent Office published only in electronic form, follows.

SEQUENCE LISTING (87 sequences)

SEQ ID NO: 1 - DNA, 810 bp, Homo sapiens
  source 1..810: mol_type = genomic DNA
atgttacaggcgtgcaaaatggaagggtttcccctcgtcccccctccatcagaagacctggtgccctatgacacggatctataccaacgccaaacgcacgagtattacccctatctcagcagtgatggggagagccatagcgaccattactgggacttccacccccaccacgtgcacagcgagttcgagagcttcgccgagaacaacttcacggagctccagagcgtgcagcccccgcagctgcagcagctctaccgccacatggagctggagcagatgcacgtcctcgatacccccatggtgccaccccatcccagtcttggccaccaggtctcctacctgccccggatgtgcctccagtacccatccctgtccccagcccagcccagctcagatgaggaggagggcgagcggcagagccccccactggaggtgtctgacggcgaggcggatggcctggagcccgggcctgggctcctgcctggggagacaggcagcaagaagaagatccgcctgtaccagttcctgttggacctgctccgcagcggcgacatgaaggacagcatctggtgggtggacaaggacaagggcaccttccagttctcgtccaagcacaaggaggcgctggcgcaccgctggggcatccagaagggcaaccgcaagaagatgacctaccagaagatggcgcgcgcgctgcgcaactacggcaagacgggcgaggtcaagaaggtgaagaagaagctcacctaccagttcagcggcgaagtgctgggccgcgggggcctggccgagcggcgccacccgccccac

SEQ ID NO: 2 - protein, 270 aa, Homo sapiens
MLQACKMEGFPLVPPPSEDLVPYDTDLYQRQTHEYYPYLSSDGESHSDHYWDFHPHHVHSEFESFAENNFTELQSVQPPQLQQLYRHMELEQMHVLDTPMVPPHPSLGHQVSYLPRMCLQYPSLSPAQPSSDEEEGERQSPPLEVSDGEADGLEPGPGLLPGETGSKKKIRLYQFLLDLLRSGDMKDSIWWVDKDKGTFQFSSKHKEALAHRWGIQKGNRKKMTYQKMARALRNYGKTGEVKKVKKKLTYQFSGEVLGRGGLAERRHPPH

SEQ ID NO: 3 - DNA, 1038 bp, Homo sapiens
  source 1..1038: mol_type = genomic DNA
atgcaacgcctggtggcctgggacccagcatgtctccccctgccgccgccgccgcctgcctttaaatccatggaagtggccaacttctactacgaggcggactgcttggctgctgcgtacggcggcaaggcggcccccgcggcgccccccgcggccagacccgggccgcgcccccccgccggcgagctgggcagcatcggcgaccacgagcgcgccatcgacttcagcccgtacctggagccgctgggcgcgccgcaggccccggcgcccgccacggccacggacaccttcgaggcggctccgcccgcgcccgcccccgcgcccgcctcctccgggcagcaccacgacttcctctccgacctcttctccgacgactacgggggcaagaactgcaagaagccggccgagtacggctacgtgagcctggggcgcctgggggccgccaagggcgcgctgcaccccggctgcttcgcgcccctgcacccaccgcccccgccgccgccgccgcccgccgagctcaaggcggagccgggcttcgagcccgcggactgcaagcggaaggaggaggccggggcgccgggcggcggcgcaggcatggcggcgggcttcccgtacgcgctgcgcgcttacctcggctaccaggcggtgccgagcggcagcagcgggagcctctccacgtcctcctcgtccagcccgcccggcacgccgagccccgctgacgccaaggcgcccccgaccgcctgctacgcgggggccgcgccggcgccctcgcaggtcaagagcaaggccaagaagaccgtggacaagcacagcgacgagtacaagatccggcgcgagcgcaacaacatcgccgtgcgcaagagccgcgacaaggccaagatgcgcaacctggagacgcagcacaaggtcctggagctcacggccgagaacgagcggctgcagaagaaggtggagcagctgtcgcgcgagctcagcaccctgcggaacttgttcaagcagctgcccgagcccctgctcgcctcctccggccactgctag

SEQ ID NO: 4 - DNA, 1440 bp, Homo sapiens
  source 1..1440: mol_type = genomic DNA
atggcttcagacagcatatttgagtcatttccttcgtacccacagtgcttcatgagagaatgcatacttggaatgaatccttctagagacgtccacgatgccagcacgagccgccgcttcacgccgccttccaccgcgctgagcccaggcaagatgagcgaggcgttgccgctgggcgccccggacgccggcgctgccctggccggcaagctgaggagcggcgaccgcagcatggtggaggtgctggccgaccacccgggcgagctggtgcgcaccgacagccccaacttcctctgctccgtgctgcctacgcactggcgctgcaacaagaccctgcccatcgctttcaaggtggtggccctaggggatgttccagatggcactctggtcactgtgatggctggcaatgatgaaaactactcggctgagctgagaaatgctaccgcagccatgaagaaccaggttgcaagatttaatgacctcaggtttgtcggtcgaagtggaagagggaaaagcttcactctgaccatcactgtcttcacaaacccaccgcaagtcgccacctaccacagagccatcaaaatcacagtggatgggccccgagaacctcgaagacatcggcagaaactagatgatcagaccaagcccgggagcttgtccttttccgagcggctcagtgaactggagcagctgcggcgcacagccatgagggtcagcccacaccacccagcccccacgcccaaccctcgtgcctccctgaaccactccactgcctttaaccctcagcctcagagtcagatgcaggatacaaggcagatccaaccatccccaccgtggtcctacgatcagtcctaccaatacctgggatccattgcctctccttctgtgcacccagcaacgcccatttcacctggacgtgccagcggcatgacaaccctctctgcagaactttccagtcgactctcaacggcacccgacctgacagcgttcagcgacccgcgccagttccccgcgctgccctccatctccgacccccgcatgcactatccaggcgccttcacctactccccgacgccggtcacctcgggcatcggcatcggcatgtcggccatgggctcggccacgcgctaccacacctacctgccgccgccctaccccggctcgtcgcaagcgcagggaggcccgttccaagccagctcgccctcctaccacctgtactacggcgcctcggccggctcctaccagttctccatggtgggcggcgagcgctcgccgccgcgcatcctgccgccctgcaccaacgcctccaccggctccgcgctgctcaaccccagcctcccgaaccagagcgacgtggtggaggccgagggcagccacagcaactccccgaccaacatggcgccctccgcgcgcctggaggaggccgtgtggaggccctac

SEQ ID NO: 5 - DNA, 1281 bp, Homo sapiens
  source 1..1281: mol_type = genomic DNA
atgtgtgaccggaatggtggtcggcggcttcgacagtggctgatcgagcagattgacagtagcatgtatccaggactgatttgggagaatgaggagaagagcatgttccggatcccttggaaacacgctggcaagcaagattataatcaggaagtggatgcctccatttttaaggcctgggcagtttttaaagggaagtttaaagaaggggacaaagctgaaccagccacttggaagacgaggttacgctgtgctttgaataagagcccagattttgaggaagtgacggaccggtcccaactggacatttccgagccatacaaagtttaccgaattgttcctgaggaagagcaaaaatgcaaactaggcgtggcaactgctggctgcgtgaatgaagttacagagatggagtgcggtcgctctgaaatcgacgagctgatcaaggagccttctgtggacgattacatggggatgatcaaaaggagcccttccccgccggaggcctgtcggagtcagctccttccagactggtgggcgcagcagcccagcacaggcgtgccgctggtgacggggtacaccacctacgacgcgcaccattcagcattctcccagatggtgatcagcttctactatgggggcaagctggtgggccaggccaccaccacctgccccgagggctgccgcctgtccctgagccagcctgggctgcccggcaccaagctgtatgggcccgagggcctggagctggtgcgcttcccgccggccgacgccatccccagcgagcgacagaggcaggtgacgcggaagctgttcgggcacctggagcgcggggtgctgctgcacagcagccggcagggcgtgttcgtcaagcggctgtgccagggccgcgtgttctgcagcggcaacgccgtggtgtgcaaaggcaggcccaacaagctggagcgtgatgaggtggtccaggtcttcgacaccagccagttcttccgagagctgcagcagttctataacagccagggccggcttcctgacggcagggtggtgctgtgctttggggaagagtttccggatatggcccccttgcgctccaaactcattctcgtgcagattgagcagctgtatgtccggcaactggcagaagaggctgggaagagctgtggagccggctctgtgatgcaggcccccgaggagccgccgccagaccaggtcttccggatgtttccagatatttgtgcctcacaccagagatcatttttcagagaaaaccaacagatcaccgtctaa

SEQ ID NO: 6 - DNA, 3975 bp, Homo sapiens
  source 1..3975: mol_type = genomic DNA
atgtcgcggaggaagcaagcgaagcctcaacatttccaatccgaccccgaagtggcctcgctcccccggcgagatggagacacagaaaagggtcaaccgagtcgccctactaagagcaaggatgcccacgtctgtggccggtgctgtgccgagttctttgaattatcagatcttctgctccacaagaagaactgtactaaaaatcaattagttttaatcgtaaatgaaaatccagcctccccacccgaaaccttctcccccagcccccctcctgataatcctgatgaacaaatgaatgacacagttaacaaaacagatcaagtggactgcagcgacctttcagaacacaacggacttgacagggaagagtccatggaggtggaggccccggttgctaacaaaagcggcagcggcacttccagcggcagccacagcagtaccgccccaagcagcagcagcagcagcagcagcagcagcggcggcggcggcagctcctccacaggtacctcagcgatcacaacctctctacctcaactcggggacctgacaacactgggcaacttctccgtaatcaacagcaacgtcatcatcgagaacctccagagcaccaaggtggcggtggcccagttctcccaggaagcgaggtgcggcggggcctctgggggcaagctggccgtcccagccctcatggaacaactcctagctctgcagcagcagcagatccaccagctgcaattgatcgaacagattcgtcaccaaatattgctgttggcttctcagaatgcagacttgccaacatcttctagtccttctcaaggtactttacgaacatctgccaaccccttgtccacgctaagttcccatttatctcagcagctggcagcagcagctggattggcacagagcctcgccagccaatctgccagcattagtggtgtgaaacagctacccccaatccagctacctcagagcagttctggcaacaccatcattccatccaacagcggctcttctcccaatatgaacatattggcagcggcagttaccaccccgtcctctgaaaaagtggcttcaagtgctggggcctcccatgtcagcaacccagcggtctcatcatcgtcctcaccagcttttgcaataagcagtttattaagtcctgcgtctaatccacttctacctcagcaagcctccgctaactcggttttccccagccctttgcccaacatcggaacaactgcagaggatttaaactccttgtctgccttggcccagcaaagaaaaagcaagccaccaaatgtcactgcctttgaagcgaaaagtacttccgatgaggcattcttcaaacacaagtgcaggttctgcgcgaaggtctttgggagtgacagtgccttgcagatccacttgcgttcccataccggagagaggccattcaagtgcaacatctgcgggaacaggttctccaccaaggggaatctgaaagtccactttcagcgccacaaagagaaataccctcatatccagatgaacccctatcctgtgcctgagcatttggacaatatccccacgagtactggcatcccatatggcatgtccatccctccagagaagccagtcaccagctggctagacaccaaaccagtcctgcctactctgaccacttcagtcggcctgccgttgcccccaaccctcccaagcctcatacccttcatcaagacggaagagccagcccccatccccatcagccattctgccaccagccccccaggctcagtcaaaagtgactccgggggccctgagtcagccacaagaaacctaggtgggctcccagaggaagccgaagggtccactctgccaccctctggtggcaaaagcgaagagagtggcatggtcaccaactcagtcccgacggcgagcagtagcgtcctgagctccccagcggcagactgcggccccgcgggcagtgccaccaccttcaccaaccctttgttgccgctcatgtccgagcagttcaaggccaagtttccttttgggggactcctggactcagctcaggcatcagagacgtccaagcttcagcaactggtagaaaacattgacaagaaggccactgaccccaatgagtgcatcatctgccaccgggttctcagctgccagagcgccttgaaaatgcactacaggacacacactggggagaggccctttaagtgtaagatctgtggccgggctttcaccacgaaagggaatcttaaaacccactacagtgtccatcgtgctatgcccccgctcagagtccagcattcctgccccatctgccagaagaagttcacgaacgctgtggtcctgcagcagcacatccgaatgcatatgggaggccagatccccaacaccccagtccccgacagctactctgagtccatggagtctgacacaggttcctttgatgagaaaaattttgatgacctagacaacttctctgatgaaaacatggaagactgtcctgagggcagcatccctgatacacctaagtctgcagacgcctcccaagacagcttatcctcttcgcctttgcccctcgagatgtcgagcatcgctgctttggaaaatcagatgaagatgatcaatgctggcctggcagagcagctacaggccagcctgaagtcagtggagaatgggtccatcgagggggatgtcctgaccaatgattcatcctcagtgggtggtgacatggaaagccaaagtgctggcagcccagccatctcagagtctacctcttccatgcaggctctgtccccgtccaacagcacgcaggagttccacaagtcacccagcattgaggagaaaccacagagagcggtcccaagcgagtttgccaatggtttgtctcccaccccagtgaatggtggggctttggatttgacatctagtcacgcagagaaaatcatcaaagaagattctttggggatcctcttcccttttagagaccggggtaaatttaaaaacactgcttgtgacatttgtggcaaaacatttgcttgtcagagtgccttggacattcactatagaagtcataccaaagagagaccatttatttgcacagtttgcaatcgtggcttttccacaaagggtaatttgaagcagcacatgttgacacatcagatgcgagatctgccatcccagctctttgagcccagttccaaccttggccccaatcagaactcagcggtgattcccgccaactcgttgtcatctctcatcaagacagaggtcaacggcttcgtgcatgtttctcctcaggacagtaaggacacccccaccagtcacgtcccgtctgggcctctgtcttcctctgccacatccccagttctgctccctgctctgcccaggagaactcccaagcagcactactgcaacacatgtggcaaaaccttctcctcatcgagtgccctgcagattcacgagagaactcacactggagagaaaccctttgcttgcactatttgtggaagagctttcacgactaaaggcaatcttaaggtacacatgggcactcacatgtggaatagcacccctgcacgacggggtcggcggctctctgtggatggccccatgacatttctaggaggcaatcccgtcaagttcccagaaatgttccagaaggatttggcggcaagatcaggaagtggggatccttccagcttctggaatcagtatgcagcagcgctctccaacgggctggcgatgaaggccaacgagatctccgtcattcagaacggtggcatccctccaattcctggaagcctcggcagtgggaacagctcacctgttagtgggctgacgggaaacctggagaggctccagaactcagagcccaatgctcccctggccggcctggagaaaatggcaagcagtgagaacggaaccaacttccgcttcacccgcttcgtggaggacagcaaggagatcgtcacgagttaa

SEQ ID NO: 7 - protein, 116 aa, Homo sapiens [sequence omitted]

SEQ ID NO: 8 - protein, 106 aa, Homo sapiens
KKNKNCRRHSLYVDFSDVGWNDWIVAPPGYQAFYCHGDCPFPLADHLNSTNHAIVQTLVNSVNSSIPKACCVPTELSAISMLYLDEYDKVVLKNYQEMVVEGCGCR

SEQ ID NO: 9 - protein, 146 aa, Homo sapiens
PALPEDGGSGAFPPGHFKDPKRLYCKNGGFFLRIHPDGRVDGVREKSDPHIKLQLQAEERGVVSIKGVCANRYLAMKEDGRLLASKCVTDECFFFERLESNNYNTYRSRKYTSWYVALKRTGQYKLGSKTGPGQKAILFLPMSAKS

SEQ ID NO: 10 - protein, 121 aa, Homo sapiens
APMAEGGGQNHHEVVKFMDVYQRSYCHPIETLVDIFQEYPDEIEYIFKPSCVPLMRCGGCCNDEGLECVPTEESNITMQIMRIKPHQGQHIGEMSFLQHNKCECRPKKDRARQENCDKPRR

SEQ ID NO: 11 - protein, 165 aa, Homo sapiens
MEGICRNRVTNNVKDVTKLVANLPKDYMITLKYVPGMDVLPSHCWISEMVVQLSDSLTDLLDKFSNISEGLSNYSIIDKLVNIVDDLVECVKENSSKDLKKSFKSPEPRLFTPEEFFRIFNRSIDAFKDFVVASETSDCVVSSTLSPEKDSRVSVTKPFMLPPVA

SEQ ID NO: 12 - protein, 133 aa, Homo sapiens
APMTQTTSLKTSWVNCSNMIDEIITHLKQPPLPLLDFNNLNGEDQDILMENNLRRPNLEAFNRAVKSLQNASAIESILKNLLPCLPLATAAPTRHPIHIKDGDWNEFRRKLTFYLKTLENAQAQQTTLSLAIF

SEQ ID NO: 13 - protein, 184 aa, Homo sapiens
PVPPGEDSKDVAAPHRQPLTSSERIDKQIRYILDGISALRKETCNKSNMCESSKEALAENNLNLPKMAEKDGCFQSGFNEETCLVKIITGLLEFEVYLEYLQNRFESSEEQARAVQMSTKVLIQFLQKKAKNLDAITTPDPTTNASLLTKLQAQNQWLQDMTTHLILRSFKEFLQSSLRALRQM

SEQ ID NO: 14 - protein, 159 aa, Homo sapiens
MEEVSEYCSHMIGSGHLQSLQRLIDSQMETSCQITFEFVDQEQLKDPVCYLKKAFLLVQDIMEDTMRFRDNTPNAIAIVQLQELSLRLKSCFTKDYEEHDKACVRTFYETPLQLLEKVKNVFNETKNLLDKDWNIFSKNCNNSFAECSSQGHERQSEGS

SEQ ID NO: 15 - protein, 230 aa, Homo sapiens
NEPLEMWPLTQNEECTVTGFLRDKLQYRSRLQYMKHYFPINYKISVPYEGVFRIANVTRLQRAQVSERELRYLWVLVSLSATESVQDVLLEGHPSWKYLQEVETLLLNVQQGLTDVEVSPKVESVLSLLNAPGPNLKLVRPKALLDNCFRVMELLYCSCCKQSSVLNWQDCEVPSPQSCSPEPSLQYAATQLYPPPPWSPSSPPHSTGSVRPVRAQGEGLLPHHHHHHHH

SEQ ID NO: 16 - protein, 128 aa, Homo sapiens
MAPARSPSPSTQPWEHVNAIQEARRLLNLSRDTAAEMNETVEVISEMFDLQEPTCLQTRLELYKQGLRGSLTKLKGPLTMMASHYKQHCPPTPETSCATQIITFESFKENLKDFLLVIPFDCWEPVQE

SEQ ID NO: 17 - protein, 210 aa, Homo sapiens
QVQVVTQDEREQLYTPASLKCSLQNAQEALIVTWQKKKAVSPENMVTFSENHGVVIQPAYKDKINITQLGLQNSTITFWNITLEDEGCYMCLFNTFGFGKISGTACLTVYVQPIVSLHYKFSEDHLNITCSATARPAPMVFWKVPRSGIENSTVTLSHPNGTTSVTSILHIKDPKNQVGKEVICQVLHLGTVTDFKQTVNKGVDHHHHHH

SEQ ID NO: 18 - protein, 76 aa, Homo sapiens
QHHGVTKCNITCSKMTSKIPVALLIHYQQNQASCGKRAIILETRQHRLFCADPKEQWVKDAMQHLDRQAAALTRNG

SEQ ID NO: 19 - protein, 112 aa, Homo sapiens
ALDTNYCFSSTEKNCCVRQLYIDFRKDLGWKWIHEPKGYHANFCLGPCPYIWSLDTQYSKVLALYNQHNPGASAAPCCVPQALEPLPIVYYVGRKPKVEQLSNMIVRSCKCS

SEQ ID NO: 20 - DNA, 747 bp, Homo sapiens
  source 1..747: mol_type = unassigned DNA
atgtctagactggacaagagcaaagtcataaactctgctctggaattactcaatggagtcggtatcgaaggcctgacgacaaggaaactcgctcaaaagctgggagttgagcagcctaccctgtactggcacgtgaagaacaagcgggccctgctcgatgccctgccaatcgagatgctggacaggcatcatacccactcctgccccctggaaggcgagtcatggcaagactttctgcggaacaacgccaagtcataccgctgtgctctcctctcacatcgcgacggggctaaagtgcatctcggcacccgcccaacagagaaacagtacgaaaccctggaaaatcagctcgcgttcctgtgtcagcaaggcttctccctggagaacgcactgtacgctctgtccgccgtgggccactttacactgggctgcgtattggaggaacaggagcatcaagtagcaaaagaggaaagagagacacctaccaccgattctatgcccccacttctgaaacaagcaattgagctgttcgaccggcagggagccgaacctgccttccttttcggcctggaactaatcatatgtggcctggagaaacagctaaagtgcgaaagcggcgggccgaccgacgcccttgacgattttgacttagacatgctcccagccgatgcccttgacgactttgaccttgatatgctgcctgctgacgctcttgacgattttgaccttgacatgctccccgggtaa

SEQ ID NO: 21 - DNA, 350 bp, Homo sapiens
  source 1..350: mol_type = unassigned DNA
gagtttactccctatcagtgatagagaacgtatgaagagtttactccctatcagtgatagagaacgtatgcagactttactccctatcagtgatagagaacgtataaggagtttactccctatcagtgatagagaacgtatgaccagtttactccctatcagtgatagagaacgtatctacagtttactccctatcagtgatagagaacgtatatccagtttactccctatcagtgatagagaacgtatgtcgaggtaggcgtgtacggtgggcgcctataaaagcagagctcgtttagtgaaccgtcagatcgcctggagcaattccacaacacttttgtcttatactt

SEQ ID NO: 22 - DNA, 1797 bp, Homo sapiens
  source 1..1797: mol_type = genomic DNA
gctcgaaaccggacggagccattgctctcgcagagggaggagcgcttccggctagcctcttgtcgccgattggccgtttctcctcccgccgtgtgtgaaaacacaaatggcgtattctggttggagtaaagctcctgtcagttacgccgtcgggagtacgcagccgcttagcgactctcgcgttgccccctgggtggggcgggtaggtaggtggggtgtagagatgctgggtgtgcgggcgcggccggcctcctgcggcgggaggggagggtcagtgaaatcggctctggcgcgggcgtcctcccaccctccccttccttcgggggagtcggtttacccgccgcctgcttgtcttcgacacctgattggctgtcgaagctgtgggaccgggcccttgctactggctcgagtctcacatgagcgaaaccactgcgcggggcgcgggggtggcggggaggcgggcgttggtacggtcctccccgaggccgagcgccgcagtgtctggccccgcgcccctgcgcaacgtggcaggaagcgcgcgctggaggcgggggcgggctgccggccgagacttctggatggcggcggccgcggctccgccccgggttcccaccgcctgaagggcgagacaagcccgacctgctacaggcactcgtgggggtgggggaggagcgggggtcggtccggctggtttgtgggtgggaggcgcttgttctccaaaaaccggcgcgagctgcaatcctgagggagctgcggtggaggaggtggagagaaggccgcacccttctgggcagggggaggggagtgccgcaatacctttatgggagttctctgctgcctcccgtcttgtaaggaccgccctgggcctggaagaagccctccctcctttcctcctcgcgtgatctcgtcatcgcctccatgtcgagtcgcttctcgattatgggcgggattcttttgcctaggcttaaggggctaacttggtccctgggcgttgccctgcaggggagtgagcagctgtaagatttgaggggcgactccgattagtttatcttcccacggactagagttggtgtcgaggttattgtaataagggtggggtagggaaatggagcttagtcattcacctggggctgattttatgcaacgagactgcggattatcactacttatcatttttggagcatttttctagagacagacataaagcatgatcacctgagttttataccatttgagacccttgctgcaccaccaaagtgtagcatcaggttaaatcttaatagaaaaattttagcttttgcttgagaaaccagtgcttccctccctcaccctctctccccaggctctctacccctttgcatccctaccaggcatcttagcaactctcactcatacttgatcccattttccatttgttgtacttgctcctctagtattcagacatagcactagctttctccctctcttgatcttgggtagcctggtgtctcgcgaaaccagacagattggttccaccacaaattaaggcttgagctggggcttgactcttacccagcagtgcttttattcctccctagttcacgttcttaaatgtttatcttgattttcattttatcctttttccttagctgggattctgtccctgaccgtcttcacagtccaggtgatcttgactactgctttacagagaattggatctgaggttaggcaacatctccctttttcttcctctaaatacctctcatttctgttcttaccagttagtaactgatctcagatgcctgtgtgatagcttcc

SEQ ID NO: 23 - DNA, 1642 bp, Homo sapiens
  source 1..1642: mol_type = genomic DNA
tgctttctctgacctgcattctctcccctgggcctgtgccgctttctgtctgcagcttgtggcctgggtcacctctacggctggcccagatccttccctgccgcctccttcaggttccgtcttcctccactccctcttccccttgctctctgctgtgttgctgcccaaggatgctctttccggagcacttccttctcggcgctgcaccacgtgatgtcctctgagcggatcctccccgtgtctgggtcctctccgggcatctctcctccctcacccaaccccatgccgtcttcactcgctgggttcccttttccttctccttctggggcctgtgccatctctcgtttcttaggatggccttctccgacggatgtctcccttgcgtcccgcctccccttcttgtaggcctgcatcatcaccgtttttctggacaaccccaaagtaccccgtctccctggctttagccacctctccatcctcttgctttctttgcctggacaccccgttctcctgtggattcgggtcacctctcactcctttcatttgggcagctcccctaccccccttacctctctagtctgtgctagctcttccagccccctgtcatggcatcttccaggggtccgagagctcagctagtcttcttcctccaacccgggcccctatgtccacttcaggacagcatgtttgctgcctccagggatcctgtgtccccgagctgggaccaccttatattcccagggccggttaatgtggctctggttctgggtacttttatctgtcccctccaccccacagtggggccactagggacaggattggtgacagaaaagccccatccttaggcctcctccttcctagtctcctgatattgggtctaacccccacctcctgttaggcagattccttatctggtgacacacccccatttcctggagccatctctctccttgccagaacctctaaggtttgcttacgatggagccagagaggatcctgggagggagagcttggcagggggtgggagggaagggggggatgcgtgacctgcccggttctcagtggccaccctgcgctaccctctcccagaacctgagctgctctgacgcggccgtctggtgcgtttcactgatcctggtgctgcagcttccttacacttcccaagaggagaagcagtttggaaaaacaaaatcagaataagttggtcctgagttctaactttggctcttcacctttctagtccccaatttatattgttcctccgtgcgtcagttttacctgtgagataaggccagtagccagccccgtcctggcagggctgtggtgaggaggggggtgtccgtgtggaaaactccctttgtgagaatggtgcgtcctaggtgttcaccaggtcgtggccgcctctactccctttctctttctccatccttctttccttaaagagtccccagtgctatctgggacatattcctccgcccagagcagggtcccgcttccctaaggccctgctctgggcttctgggtttgagtccttggcaagcccaggagaggcgctcaggcttccctgtcccccttcctcgtccaccatctcatgcccctggctctcctgccccttccctacaggggttcctggctctgctct

SEQ ID NO: 24 - DNA, 291666 bp, Homo sapiens
  source 1..291666: mol_type = genomic DNA
ctcggcgttctcaccgctgcagaacggctgcagggggcagagtaaagagctgctgtcagtttccctgcccagagagtgccaacagctgctctgacctattgcaggcatgtgtgttccaggatgcagccttcctgcactttgaccactctagattaattgctaaccaagatatgcacatgatggggctcacaaagtattaggcggtattttaacaacaaaagctgcgaagaaatccctagaaatgttggctcttctggctgggaaaacgcagtctgtcaacagttgcctcaaaaactcagaagctcagagagttggattcggtcaccagagaggcccctcaaagaggccccaaccattcagatcctctgctctgtcccccatgacagcggggacgaaggtcctaagccctggccgggagggcagttgacctcgggactcgccgcggggcggagcgggtgctgggaggaaggagggcgtggctggcggggtgtggctggcgggacggggcggggcgaagacagagcgaggcggggcctgggacggggggggggtcggtgtcgccgtgggggcgtggaatgtggggtgggcgtggctaaaggcaaagggcggggcgcgcgcgtcgggaagatggcgctacgtctgctgcggagggcggcgcgcggagctgcggcggcggcgctgctgaggctgtgagtgcaggtccccgttccccgccttcccggcccggctcgccgcgggtcggctcctgttgcagccccgcgggccgggcgcggcctccccaagccctcacgggaacccagccggacggaagcaccatgcgcctcccacgcgctggctcgacctcgtccaaggtcgctgccgcccgcgcctccctttgggagggccctcgttgcacccggaaaatgggtacacaccttaggtcgaattacctggactcagccccaggaaacaaaactgcctgcctcccccaaatggcaaacgtgaacgcgccagtctttgagaggcggcttgcctggtgaagaacacctgcggttcgtttaacacagcggttcccaaacggtttggtctcaggacccgtttacacgtctaaaaataatttgaggaccccccaaagcttttgcttatatctattgatttttgtgcatgaggaattaaaccagaaatttaaaaaatattcacttaataacaaacccattaacttttaatacaaataacactttaatgcataacttctcaaaaaaaaagtgagaagattggctcatggtttttatatttttgaaaatttctttggtttaataaaggacagctggagtctcatatcagctgttttgaaggaaatatttgaaagaaattctgggctcatgcagatgcagatattagttgggaaagggaggaccaagcagaccctctcaacgggtctcagggaccccctcaggtgtctttggaccacactttgagaaccgctggtctagcacttgcccatcgcctaggtacgtgcacatacatggtctcatttggttcccttgaccaccatgtgaagaagttgggtgtcatgtttataaagatgaaaaaacagggtcagaaaggttaaggattctcaaagccctatgaccagtaatgagagagtttggttcaaacactaagtgtatggctcctggtctggaacttctttatttatttatttttattttttgagacagagtctcggtctgtcacctaggctgtagtacagtggtgtaatctcggcttactgcaacctccacctcctgggttcaagcgattctcatgcctcagcctcctgagtggctggcattacaggtgtgcaccaccacccctggctaatttttgtatttttagtagagacagagtttcgccatgttggccaggctgttctcgaactcctgacctcaagggggtccacccggatcagcctcccaaagtgctgggattacaggcgtgagccaccatggccggcctggtggtctggaacttctttttttttttttttttttttttttccgagatggagtttcgcttttgtcgcccaggctggagtgcaatggcgccatctcagctgactgcaacctccgcctcccggattcaagtgattctcctgccgcagcctccggagtagttgggattacagggcgtccgccaccatgcccggctaatttttgtatttttaatagagacgaggtttcaccatgttggccaggctggtctggagctcctgacctcgggtgatccacctgcctcggcctcccaaagtgttgggattaaaggcgtgagccaccgtgcccggcctgggtctgaacttcttacgtcttcttgcactgtgactcttcagtcacccatgtcctatgggaggacccacctagtcttatgcatcccactttcccatttcctccgctgcccctggcacaggggagtcacccctcgccctagaggagcagctcaggcagtgtatccaggctggtccagaagggtccttttctggcgccttttgagggggccagcgtctgtgacctgttcagtagcgggtccagtgagcgcacacagtccccacgccagtacgctgggggttaactcagtgctcctcacccgccttagcacactggtctgttctcgacatgtctacccgctgaatataggattcttgattggcattttttttcctttgagcattttaaagcgtattatcgcactgtctttttgcctccattattctaatgagaattcagacgttaatgttattagggttctatgtaagtgatgagtctttttttttttttttttttttttttttttgcttgattttctctttgtcttggtctttcggtggttttattatgatgtgtgtagatctgtttgagtttatcctcttggaagtttattgagtttcttggatgtgtatacatcaaatttgggaagtttttggctattgttctctcaaaaaagtctactctcttatctctctcttctctttcggaggctcccattgcgtatatgttggtgtagttgatggaaccccacaggtctttgagactgttccattttctttctgttcctcaggctggacaatgtcaattgacctgtctttgttttttttttttttttttttttttttgagacagagtcttgctctgtcaccaggctggagttcagtggcgcaatttctgcccactgcaacctctgactcccgggttcaagcgattctcctgctccagcttcccgagtagttgggattacaggcacgcgccaccacgtccagctaatttttgtatttttagtagagacggggtttcaccatgttggccaggatggtctcgatcttctgacctcgtgatccacctgccttggcctcccaaagtgctgggattacaggtgtgagccaccgtgcccagccgacctgtttttaggtttgctgattgctccgtcttccaactcaaatcattttcattttaatccagaacttctttctttttggagaatgagtctcactctgtcacccaggctggagtgcagtggtgcaatctgggctcactacaacctctgcctcctgggctcaagctgtcctcccacctcagcctcccaaatagctgggactacaggtgtgcaccactgcacctggctaattgtttctattcttttgtagaaatcaggtttcgccatgttgctcaggctggtctcgaacttggctcaagcaatctgcctgcctctgtcgctcatagtattgggattacaggcatgagccatcatgcccggcccttttctatactttctatctcttcattgatattctctatgtactgaaacatcgttctcatactttcctttagttctttttttctttctttctcttagagacggagtctccaggctggagtgcagtggtgagatcgtagctcactgcagcctgcagctcctgggctcaagtgatcctcctgcctcagcctccccagtagctgggactacaggcacacaccactatgcccagctaatttttaaattttttgaagagacagagtcttgcagtgttgccaagggtggtcttgaactgctgggttcaaatgattttcttgccttggcctccaaagcagtggaattctaggcatgaacgactgcacctggactccttcagttctttatgcatagtttcctttcgttttttgaacatactttaaatagatgatttaattagtaagtccaacatctggacttcctcagggacagtttgtactgactacttttttcctgtgtgtataggtcatactttcttttcgttgcatgtcttgtatatttttttgaaaactggacattttaagtaatataatggggcaactctggaaatcagatttctcccttttgccagggtttattgttgttgttgtttgcttagtgactttaataaactaattctgcattgtattctttgtcatgtgcaaccagcgaggtctctgcttggttagcttagtagtctaacaattagacaaaggtttccttaaattcctggaaccagtaagtctcctagtctttgctgagggactctgtgtgtgtcaggacatgtcttcaacattcagccacagtttgtcctgcttccacagagactgaaggttagctagacatgagcacttaaggtctttccttagccggtatacagccctgcacatgtgcgtggcctcctagagtctcaggaacatgtcacaacttttcagagctctctatgggtatcttgttctccatttttgccttttaagtgttttggttagcctgttgtttaccctgttatcttccatctcaagtagctgtgatggtaaataagtacttctgattgtttggacaaatgccctccgggaaaatactgttcccactgtgcaagctctgagtcaggtcaattaaagacagttttacaagtagggtcttccaaggaaccacaagacaggtcaaatagtgacattttccagaaatggggctttccccctctagtggctgccatgctgctggttttcactgtgatgggggctattgattttcaagtctaccacagagctggggaagagggatagggtaaactaaacccccacgacaattgctgttcttactgagattcatacatttttcttgaataaatgatccctatattgctgcaagtctttaatttctagaattctgaaaaagtttattctgacaatttttgccaatattcttgttgattttatggaggataggattttcaaaggtcctttttctgtagtttttgctgaagtcagcctgcatagagttttgatcgagtggatttgaatttataaatttttttttgcatctgttgtgttgatcataaggcttttcttcttcagtgtgttaatacggtaaattacagtgattgactttttaaaagttaagctgaccattgcattcctggaataaaccccactgattgtgatgtattgtttggattgcatgtgctaaaattttgttaaaattatttgtatctgtgttcataaggaataatcgcctatagttttctgatattgccttggtctgggtttggtattaggatggtgatggtcacataggatgtgttggagagttcccgcttctatttcatgaaacaatttgtgtaaatttggtaagattttgcctgtaaatgtttgcacctgcagttttctttgtggaaaaagtgttaaactacaaatttagtttctttaatagacatattgccattcagattatctagttcttcttgagtaagctttggtagtttgtatctttgaaggactatgtccatttcatctaagttgtcacattcacgtgcctggagttgttcatgctgactccttatcctttttcttacagctctacaaaggtatataccacacaattcaccctttgtaagtgtgtgattaaataatttctagtaagtttataggcccatcactacagtccaatgttaggcccccctccaaatttctatcatcccgcaaattctcttgagcccatttgcagttaatccttacccctgcctctagtctgtcatctccttactgtttgtgtcatccatagtgatgtgtccttcttcatccttgatatttgtaattcttttttctctgttttttattttatcacctggcttgagttattttgctctttttaaagaaccatctttttgttttatcgatttttctcttttttttgttttctatttcattgatttctgtctcatctttattatttcctaccttcaccttactttgggtttaatttaccctttacctttttaaggtggaaatttagataattaattttagacctttctactttttttttttttttttttgagacaaggtcttgctctgtcacccaggctggagtgcactgatgcaatcttggctcactgcaacctccacattctaagctcaaacagtcctcctgcctcagcctcccaagtagctgagactacaggcattagccaccatgtctggctaatttttgtattttttggagagacggggtttcgccatgttgcccaggcttgtctcaaactcctggattcaagcagtctacccaccttggcctccgaaagtgctgggattatggatgtgagccgccacacccatccggggtctactttctaaatataagcactcagtaattactttacagccatgcttggtggctcatgtctataatcccagcactttgaaaggctgaggtgggaggatcacttgtggccaggagttcaagtccagattgggtaacatagtgagatgctgtcactacaaaaaaaattttaaaagttagctggatgtggtggctcatgcctgtgatcctagccacttgggatgctgaggtgggaggattccttgagcctggggatttggggtttcagtgagctgtgatgataccactgcactccagcctgggtgacagagcaaagctctattaaaaatagtgatgataataataataataataataataataataataataataacaaaattccctctaaggattgttttaattccctctagcaaattttgcaagatttctgatacctgtaatctcttttcatttcttatgttgatactctgtttctgttttctaaagtattcatagtaagactccaaaagaaaaagggctccctggctgtatgtgttcagtggtagcagccaaggaatgtgccaggaaggtacttcacattttgcagtgccgtggtggagaggaatctggtaaagaaaaaaccagatgaagacagtttagagaggcgacaactacaagctaagtacctgagattctgggtcaacaggaaggggacagtgtgtgaggaagcagcagggccatggaaggtggctgaggggcctggatggggttacctgtcagggtcccaataggccttttgtagggttggcttcatctttgaagcctcctgaggttaccgtgacaaccactactgtccctctgtactgctgtgaggccactaagggaaaaagggagggaagggacccaaagggaggacagaggtgggagaagagggagcgatggggagagaaaggcagagaacaatggaagcagtgagcgagaaaggggagaaacctcactgaaaaggaggcagggtaaacatgactgagatggaaaaatgatcacattaaaaagaactcactcagagtaaggatgaatgtgtgttctttgctacttgaactggtattaaaaggccaatgtgaagtgttagatattttaaaatgtttattggtatcattagaagttgacttcagttgcccaaatgcatggtgagaaaggggatgtgtaaacaaaaatgatattttggattgtgaggcagaaagtcattttaaatggccctgggaggcagagggcccaatcctctcagtcgcctgggactgtcctgggtttagcatggaatgccttatgttcccagaaaccccttaggtcccagcaaaccaggatggccattcaccatagaggtggagaagtaaagggctgtggatgaagacgggtacttattaggaacagggaggaggatggagttggaggggatgagtgcagggcaggatacagagcccagaaggaaaggaattgacagaagctgggagaaagaataaaaagaccagtggtccaagatggtagaccacaggttcaagaactggagcaagagtcttctggaatggcctccattctagaaccgagagagagtattcagaatgctttaatggagtaagaagggccactgcttagagtggggctgaagagaaaagaaagaaggagaccctgcggaagcggcaataccaggaaggcagttgtatgcacatcatgcagaccaggagtagcctaggggtaggggacatgcctgggctggacagtggaatttgtgggaaatcagatttccctgagcaaaaaccagtgggcagcagccaaactggtgagcaagaactggctgtggtggctgggcccgaattgggagctacacctgcccgggcaggtgtagctgcgagggaggtctctgccaacaactcagctgtgccgtgcctgctgaacggcctcaccttggcctctggctctgttgcagctgtgtggggctcgtgctcctacataccgttatcctgtggtagagttttaccgtggaccagagccatctagaggacattgagttacccacatactttctgtgggagaggccaaggagtcagggggggaggccgggacctgaagatcaactctttactgcagagatccctccctccctctctctgtcccatggatccagagggaagttgaggacagtttcatgccacatgcttgacccgactcaactgagtaactgtggccactgagaagactctgtccttgcaaataactctccttagtgcccatattctgcagaatgtttgagtggcacgagtacttcattcgtctagaaatatttcatggtagtcagttgctaataacaggatatctgcaggtagtgtgttctcaggaggcacacctgaagcctcaaaggtgaggacatagacatggctgtgggtgagcctgtgccaagacatgacccatatccatggggagtgctctcagggcagctgacactgctcagcctcagcagtctccagtgatagcttcggaacagccacggtctgactgatatactttctgaaaacagcctttggtcacacagtttcctaactaaatgtggtggtggccactagaagttgccattttatgcgggactccctgtgaggaagcccatagtgctggtagctgaaatttaggaatgcaggtttctaagaaggctcggaaaagcaagctgggctccttggggaggagctattagtacgtttaattaaattttttaacatataaaaagttgttaattataaaaacaacatttttttctaccctgagtgcagctggagctgtgttctgccgttacacaattcctcattaattccacacattgcttacgatcctgtgaagtttagaattttattaggcaataaataagaaatcaaggaaataatatttgtggtttcatatcggtcacttgggtatgaatttaaatccactgtaattcaaacaggtttagtttatttcatgttgctacttgaatgtgttatagcgtatcaattaaataactcacttgaatgatgcagacttgagattcattccctccttctttccttccttcctttctcaccccatcctccctaccataaaccaggtttagaatagctgttaatttagctgctttgattttttgttgttgtttattttgaaacggagtctcactctgtcgctcaggctggagtgcagtggcacaatctcagctcactgcaacctctgcctcctgggttcaagcgatcctcctgcctcagcctcctgagtagctggaattacaggtgcacaccaccacgcacagctaatttttttatttttattttttatttttagtagagatggggtttcaccatgttggtcaggctggtcttgaactcctggcctcgtgatctgcctgccttggtctcctgaagtgctgggattataggtgtgagccaccacgcctggcttttttttttttttttttttttttaagactggtgaagctatgttgcccagactggactgcagtggctattcgcaggtgttatcatagcttactgcagccttgacatcctgggcaccagtagcgcttcttcctcagtctctagtagctgggactgcaggcatgtgctaccacacccagctgattttatgttttgtttacatttaacgatgttaatctaggagcagtgatgatgttcactgttgttccacatgactctagcacatatatatttgtatgtgtataaccacagttgttcatttagtctgtttccaggttttcatttagtctgttccaggttcatttagtctgtttccagacctaaaaaggcctgttggctaccgcgacagccttggctgtcacactgggcccgcccatgggtgtttctgtaagtggccatgaacctcttctgaactacaccacatgttaacatccttctcttagttaggtctttgagattggcagaggtgctctatttaataataaaggaatgggctgggcattggtggctcacacctgtaattccagcactttgagaggctgaagtggaccgatcacttgaggtcagaagttcaagaccagcctggccagcatggtgaaaccccgtctctactaaaaatacaaaaattagcctggtgtggttgcgcatgcctgtagtcccagctactcaggagactgaggcaggagaattgcttgaacccaggaggtggaggttgcagtgagccaagatcatgccactgcactccagcctgggtgacagagcgcgactccgtctcaataataataataatagtaataataataatataataaaggaatgaaagtttccttagaaagtaaggtttctattttaatagaatacttgagtgagcaagtctgtcttaactgtttctcctcactgtgtctaaatgagaaggaagaatgaccctggtgtctgtatttgcaggacacttttcagtattaatattcagaaccccaaatattgaaaagtgtaaaaggcagtacttgctacttcattgtcccgttgctagccccagtaaaatgagggtcttagtttagcggaagactgtgtttactgtttaactcacagttcacgctaaaaattggcacttttttttttcctaataagggcctctctatggacctttttaaagtttatatggtcattaaaaacatcattgcacacatatactttgtaccactttggaagtagtgcaggcttgtttgaaagcatacacttgacttgtcttcttacttagtctcacagtattctttgtgagaaggttgatatgcccacattattctgtggccaaaaacaaaagtttaggaaatgaaaacagcaaacagaaaaccccatgccaagtgctgttttcgtagtgaggcactggagggcgctccgctctagcaatgggagatgcacgcagtctctgcagtctgcaggctgccctcacgaacgcctttcagaagatgtaagagttttttctgttcattttaaggcaaatgaaagacacatggatggtagaggaaatatttctatactgacctataaacggtccctttaaaagtttatgagaaactgaagaagtagctctgtgctccagccctccttatgacctcctctctccctagcctgttgcagcctcaccggcctcctcttctgggctgtgtcgtcagcctgaagccctctgtccctttgtgcctcagctcaaatgtcacaaatcagagaggtcttccttgaccaccctgtacaacatagcctccaccccgctaagcagcctctgcactaccctgtccccttactgctgttttcattttttcctattgccccatttccaccagacatatcacatgcttatttgtttattgtccgcctgtatcctaccccagcccccagatattcatgagagcagggacttggtttattccattgctactatatatccagaacctaaaacaatccttggcagtgcctgatataaatttgcagaaggaaaaaagaacagatttaggaatgaaatattttgagtgtttctaaagatttagtggattttttttctttattttggtaaattatacataacaaaattatcattttaacttttttttttttgaggtggagtctagctctgcccccaggctggagtgcagtggtgcgatctcactcactgcaacctctgcctcctgggttcaagcaactctcctgcctctgcctccgagtagctgggattacaggtgcccgccaccacgcctggctaattttttgtatttttagtagagacggggtttcaccatgttggccaggctggtctcgaactcctgacctcaggtgatctacccgcctcggcctcccaaagtgctgggattacaggcgtgagccaccatggccggcccattttaaccatctttaagtgtacagtttagtggcattaagtacattcacattgttgtacaactgtcaccaccatccatcttcagaacttttttatcttcccacactgaaaccctgtgcccattaaacactaactccctgttcccttccccccacccagcccctggtaaccaccattctcattattttcactgtgaatttgactactctaggtacttcacatacatagactcacatatttgtccttttgtgtttggcttatttcactcagcataatatcttccaaggtgcatccatgttacagcaggtatctgattttcattcatttttaaggctgaataatctattgtgtgcctattccatattttatttatccatccatctgttgatggacatttgagtatcactgccaccttttggctattgttagtgcatgttctatgtggagcacagaaatgtgatgtttaagtttaagcctaaagtggatttctttgaattatactagccagtcacagatcactcctgggtagtactatggtttgaatgtggtatcccctccaaaattcatgttgaaacttaattcccattgtggtggtattaagaagtggggccttgtaggaagtggttaagtcatgagggctgtgcctcatgaatgggttagtatcattggaaagaggcttcagagagagttttccagtcttgcccttccaccctgcgccatgtgaggacacagcaataaggcgccatattggaagcagagagcagccctctgtagacaccaaggctggcaccttgatcttagattccccagcctccagaactgtgggaagtaagtttctgttgtttataaattagcccagtgtgtaatactttttaaaatagcagcataaacagactaagacaggtggtttctacttttaggaaaatatttttagttcatattaagatagaaacttattctagctcctaaaaatcagaattgttttaatatcctcaggtgctctttaattttttcttacaattgtcaaaaacaagtttaaaatcaagttactaactctgctataggcaggaagctcctggatagatactctggggttcaagtccaatgctgacccgcagttggcccttgaccttgttcaaggcccttatctagattgtgccttatttttctcacccatcaaaaggaggatggacaagtttcttcctgccagttgacattccagagtctagaaaggaattattgccctcaagtaagacgaccttggggaattcagaaataaaaagtatatagctttttgagctctaagttattttggtccatttgagctcaatttgaccagagattgaagataaaagctctgcctcccccaaacttattggtacagcctgcactcaattggttttaccgccttctcctgacattaagggagatgtttttggttgtgtggtgttgaccctttaggtcctcagaaggggcggcaccctcatggtgtctctgcctgcagcagggagtgctaccaggcactttgttccagtgacttatgatggacacagcacagcgcctaggggttaggattctaaaataattcaggtgtatggagacgcagaacctaaaagaactcaggagaaagagaaggtagatatcctaaattttagtctgattttgactcagaagtggatacctgattttggcctacatttcacctctttcagtttttttctgctccatttgggttccctgctcacttggaaccctcaagctggcttgcaaatgcccagagccacagtgctctcatagggtctgcctgttctagggcccatcagccagcagtccagcagggatgaccagtgagcccaagaaaacaagcagtgctgatgtcagatgtgtagcccttctcaagtgctatacattttaagaaatgccttcactgggcatggtggctcatgcctgtaatcccagcactttgggaggccaagatgggcggatcacgaggtcaggagttggagaccaacctggcacaacatgataaaaccctgtctctactaaaaatacaaaaattagctgaacgtggtggtcacacacctctaatctcagctactcaggaggctgaggcaggagaatcgcttaaacccggaaggtggaggttgcagtgagctgagatcctgccattgcactccagcctgggtgacagtgagactctgtctcaaaaaaagaaagaaagaaaaagagagagagagaaagagagagagagagagaaagaaagaaagaaaaagaaagaaagaaaaaagaaagaaaatgtcttcttcagacacctcaactacaaaggagtcagccagtcaagagaatttctcctctaccaggaagagaatatgggtataggagaagcttggagtctctctgccacccctcatgttctctggacaaagtcccaagctgtgcgtttgaatcatcagtgtctacttgtcctgcagaacatcaggaatttaccaggtaatctggtgacatgcctgcaccagaggactgggagaatccttaccgttaaacctcttctccccacccctgaacacataaatacactttttaagcttcctaacgctgtactctgatcatggtgcccacccccttggacagcataaatttcccagtgacctccaattacctgccgctaaagtccaggccccttagtgtggcatgtacgcacctcctcacctatcctccatctttccatttccccccaggccgcttacctgtggcccacatgcaccactcaccatgccccacactctcgagtcatcagtgccacttcctcctggaagccttctttccctggacacctcagccagccatctgtctcgtccctgagagccctaacctctccgctgacttttgtcacccttccctgtgttaaggtgatcgagatgcagaactcccagtggtctttgatgcctcctctcctctcccacccacaccccatctgttgccaggcctgttgattttccccttcaggtgccaactcttctttcattgtattagtttcctattgctgttgtaacagattatcgcaaacatggtggtttaaattaagcttgtccctgcagcctgtgggccacatgtgacctgggatgactttgaatacgacccaacacaaatttgtgagctttcttaaaacatgagattttttggcgatttttttttttttccctttagcttatcagctgttgttagtggattttatgtgtggtccaagacaattcttcttccagtgtggggccagggaagccaaaaaaactggacacccttggttaagttaacacagatttgttaacttatgcttctgcagtttggaagtctgacctaggttttgtgggctgaaaccaaggtgtttacagggatggagagtgttctttctggcagttctaggggtgatctgtttgcttgcctgtttcagcttctagaggctgcccacattctttggctcatggctccttatccatcttcaaagccagacccagtgggctgaattcttctccccattgctgccatctctcgggttctgttgcttctgccacccttttccacttagaagcacccttgtgattacgttggccccacctggataaccagggccagtcgccccaactcagggtcagctgattagcaaccttcattccactttgccatgtaacctgacatatcaataaatactgggtataaggacgtggacatctttgggggccattattctgcatacccatccactgttatagattcaggtttgaactcttggaatgaccatctaatgggctgagttccctcattgcctctcatgttatgtgctgccagcatagatattaagatgtacattctatcatctagacctgttggttccaaaaacatctcttggatctgtccttttctttttgtctccattgcccctaccctagtggcaaacaatcctgtgaaaaaggattgtttacatgtatgggtgcccctccaggcaatattcaagtgtactcttcgaggctgttttagtacattcaccatattgtgcaaccatcacctccatctagttccaaaacattttcatcgccctaaaggagaactctatccattgagcggccattccccattccctcctctcctcaacccctggcaaccaccagtctgtcttctgtctctgtgcatttaccattcctttgtatggatatagcactacattttgtttattttttaaattaaatttaattttttagagacaggatgtagctctgtcatccaggttggagtatagtggcaccgtcacccaggctggagtgtagtggcatgatcatagctcactgtagccttggactcctgggcttgagtgattccccctgcctcaaccttccaagtagctaggactgcaggcacccaccaccacacctggctcattttttaaatttatttgtcagttgatggacatttgggctgtttccactttttggtgattgtgactagtgctgctatgaacattcatatacaggtatttgttttcagttcctttaggtttatacctaggaactgctgtgccatatagtaattctatgtttaactttttgaggaaccaccaaactgttttccacagtggctgcaccattttacattccaccagcaatgtacaagcgttctgatttctccacatcctcgccaacacttgctattttccattgtttttattgcagccatcctagtagatgtgaagttgtattctcgcggtttcttccaaatcatttttaaatgtacaaattgtctaatttcacttctctgcttcacatccttcctattgcatttataataaaccctggcccccatcttggactccaaggagtatatgatcttctccctcctacctctttctctcactgccttccatgctcctcactcagtccacttaccgagcatcattggccttctcctgttccctcaagcagggaaggcaaacacccatgggcttttatttattatttctttatttattttttaacacttccctccttaggtccagagaccatgggctttgaggctcaggggattcagatccaaggtccatttagaagtaaatgatgagatgagttgggcactgtggctcacgcctgtaattagcactttgggaggccgaggtgggcagatcatgaggtcaggagatcgagactatcctggctaatacagtgaaaccccatctctactaaaaattcaaaaaattagccgggcatggtggtgcatacctgtaatcccagctactcgggaggctgaggcaggagaatcgctttaacctgggaggtgaaggttgcagtgagccgagatcgtgccactgcactccagcctgggcaacagagtgagactccatctcaaaaaaaaaaaaaaaaaaagatgagatgatgcattgaatgctaggtatggcgtgtatgtagttcataagaacaccaataaacagtggatgtaaaaagcaacatcagatagatacctaaaggccatgtctttggaacaggggtaaccacctgaagcatgtcctcccttccctgcctttttcctccctcagagcaccccgttcttcattgcacttatgatttgtcaccagccacgaatgtgtgcatctccctgttatgtttggtctcctgcactgggctggaaactccacgttcaccctttatgcctgtgcccagcacagtgcctgacacagtaggcactgattaaatgattcttgaatgactgcatcatcatatggtcacagtaaacagaatccatcactaattatctatttgacatgagcgggtggaaaggcaaagtttttatgcatgagtgtgggtgtatgtatgttttcctagattatagatttgtctaaacattcctgctaattttaagatatcaaatctgaagtttccttggcttgaatttttgaacataggccaaggttgtttttagattcctcagtattctctcttttgtgaaagttttcaaaagtataaacggcgcatcttccgtacaactggtttacattgttggtttatgcagttgagttgtgggcagaggggaaacctcaatgtctgaatgtggctttaccccagcgctgagatatccccgggagagcttggccagtctgagtccatgtggcctaaagatcctccctagccagttccctgtcccacctacattctgtttatttcagaacttctcacctgttgaacacacagcccttcctcaacacaggaccagctcagcatcgggaagctgtattttaagaaaatcatggtcttccagctcagtggaggcatcttagcgggatccaaaataacattcgcttttatcttgaaattctttctgtttttggtttttccccaactctcatccttcccccaccttcacctcagacactccaggttattactgaaattaagcatgatagaaagtgtggactcataggctcagttctgttccctccttatggccagcgtgtggaagagctcctctgctctcatgccttctccatcggagctggttcatcaccttggcctgtcttgggcggagtccccgacttgggagttgtgctgttcgtttgctgtccatcgggctgtaagctccttgaggaccaggcaccatgtttactcacccctgtcccttctgggaacctgggggaaactgctaactggcgtggctctcagaccttgcatggccccacacattttttttctgtgggaaccactaagcattagcaactcgccagtgatcagcagggattagcagcgtttaggctccgcagacatttaatgtgctaattgaggagcccagggttcggccaaggaagtgatttacaaaggtggaaacgggactgttgacacaggtgcatcttattaattactggtttggggaattagtaaaaatgttaataatttgagggattattgttaatgaaggataagaaacttcacaaccatatggtttactacttgatgcgattttcccttttttaaaaaaatacttttaaatctgggttttaggaaggacaagccatttcttgcagaacttattgattgtattacataggtaaatggaaaaatatttcctagaacaattttttgtaacagaaaattctaaaacataccagtagtatgaagtaagaggcacctatggcacatctttgtattattcagtccctcctttatacattcttctgacaagaacgggagtcatgcctcccaggctctgagtcccaggctccgagcattactgaggcagctcctaagaagagagaagggaagaacatttcctgaggatctttgctgtgccaggttccagaaggtgctttggcgcatctcacgtgagatacgggctccttttgcctgctttctaagaagggtgcggtgtgaggtggctggctgcgtggaagaggcctgggaggagtaattccaccagtattgtgtcttagtcttcaagtggccagtgcagtaccttggcctgtggtagatcctgagtaaatgttgactgaaacgaagatgccatggccggtggtgaagcagggatcagtgcaacaatgctgtgagaatacagaggcaggggtggcttttggagggcacctggatcattcccagggaagctgccctctgggcagagtttaaagtatggcagagggaagagtgttcttggcagagggcacaggcccggtaggggagttatgagcaggtaattgtggagtatgggattcccaggggctgggcatgacgttgagagcgggggaggttgaggccagactgtgaagggattcccaggccagcccaggactgacttcagatttacatcctattggcaacaaggagccagtggagatgtttaatctctttcggcctccatcaagttagcctttcagtctgtaacctggcctaagtgttagtcccatgtcatttgaaccccttgcctttctcttttacttaaattacattcacagtgcgctgtgaaacctaattggaatagacaaaacgtggtggaactctgcagcttatggggccagttcatgctcaccttaatgtgcttataatgtacatttaaatactgccagttatttggagctttcaggtgacttcacttctctgtgtattatgtacttcgcttcctacatctgcagttaatttgttaagagaccttaatgagaaacttcaaacagtttaaatgtcaattaccaaaaaagtaaggttttcaagttccagtaatctacccgattggtcatcagaatgtagtcccaggtggatgtaatttaagacatgacattccagagcttcagttacaaagaatttatatatttcgggactaataaactggctccagtggtggctacacttgcaggattgtctgcagttatgactcatctagtaccggcgctgctcagaactttctgtccacggagttcacactggttttgtgtttgggctggtgcttttgaatctgaaaaaaagtgcataaaaatatgccagaaatgtagtaaatattgtgatcatttcattttttaatccgacacttttgagaggaaaagagtattcatcagtactttatcatagatttaattaatgggataatctttaatttctgactcagacatctggatttgtttcttgccaccccctcctttttttctgtgttcctttctcgtctttatttttgatgaagataaaatacttaaagaaagcgttgaatgtgatgatgagtattgttttaacagaaagtaaaatcaaaagcatgcagaataaattaaccttgcattttctcggcaggtcagttagtgggtgttatatccttagttgttggtgctacaaagtaaataatttttggcagctggtttagttttcaccacttctaagcctatgacaaatggtcttggaagatctttggtcttaaaaaggaaaattttctgtgtgcgagttttaagttcagttttgttgggttttgaagtcttttttatgtaagccacttatgtggcattttgttttatttgaatttgaaattttttttaagttttaaagctagagtctgccacattgaactgtttttcacacttggcatttaaaagttaatttgctttttctgtttttaaaagagactaaaaaactaaggtttcccctactaagcatttattagtcaaccacttttgaaaattgaaaaattagtttgtatggttttagattgtttttctcccaggagaaataatgttgctacataatctcagacctgcattcacgtatttagcctgccataagtcactgtcaaaatgaagaaaatgctgaaagttagatatacctgcacatgtgaatttcatgtattttctggtaatcaactctgttttaaaggcttttgggagttgttttctttcagaagcagcccactggtgctgtatttggcatgttgtgtgttattaaaacttcatataaatgcagaggtactaaaacgtgaagtttacaaaacccatcggaacatttttacttgtgtagttagcacgatcacttctccaagtacaataatctttgtgttgtgagcctgtagacaaaactcgtgtctggcatatctgattggaatgtgaaatttaatattttccactagttatttcccaacatgcaaagtgaactgatacccattaaatatatatatttaagtaaaaatagagaggatcagtggcctaatcagctttacagctgtgaatttaggaagtgaattcacaacatccctctctccagagagacgacttgatgacttactctcggtttctttaagtgatatagtagaccttgtttggattaatcagcagccttgggagttggagcagtcatttgcaatattgagtggaaaagttccttgtgcttggaaaagtcagaaggccaggagtgagagacatggcctcatcctttccctggtggctcctcacctgtgaagttgcaccagggtggtaataaaattgtaggagctcattttatgtgaaaccattagcagcctgggaattcaggactagctgcctttcatactttaagacactggaaggtgtcatttataagcatagagagcctgcaggaaggcagaacaggcttgtaaactggagcctgaggctctgggcagcaatcagtgtgtaatagagtttaaagtcttaggttatcagaatcacaaatgggcctttaagtgttgtgggcaaatcccaagaaacatctgtctataaaaggcaggtacaatggccagttatttcctcctggttattgtgatattgttattttctgtttctgcctttgtggatgggagtggggagagaaagggaggggcccttgctacaagtgtaagaataaaattgtaaatgtttgtgttagttgaaaaaaaattgactatggtaagtgtcgcagctaatgtagggtgttttcaccttgaaacagcgactgccgcccagttcctgctgcttcgttcgcggactctgaattccactgctggggcaggcgtgtgtgacaggcagagagagccctggggttgggggaacaaggaagtgtttccagttcccatttggcttatgcattggagggttccccaatgtggggacagcgtccaggttcttggcctgtggaaatgacaaatggccctgacagggggctatcccagcttcagtgtttctgttcaccatcctaagagtggttctttatctgaaaccatgaagaaaaccagatgattagagaagaattcaagaacccattctgtagacattgcctcctgacaagtacaaatgcgtctgttgaaatctcagtgctccaagtccccatctatccgccttccccctcctccaggttttagacaggttacctgattgcccctggttggccctcatcccctcccctatctgggcagcgctctccctgctgtggggttgggtggtcctcctgctcctgggtcatatggtatcgagagatgctgattccatctgcagctccttctctgtactgtggacttcactgcttgtctctttggccactaggaagcatttattctgattctcatgggcagcttgagaggcttcccacagagggaagggtaggcctttaatatttctgtccttcatctcaaagactgtttctttaaagtggacacagatgggattgggctggagagaggtggccccagcccaggagatcatgttgtctgggtgaaaccactgcacgctctggtccctgggctcctattgctcagggttcctttttaaagcccacttgtcgagtcttctttctttacagaggagatgttgtgcttaccctcttgtgaggatctcacagtgttctagcgcctctccttggagatggtatttactggtttgagggtgacctctgctaatggacctgttcagtcaccaggtacagggccttcagttgtgttgtcgaagaggctctgctcacccctgccccaccatatctgagaagtgcccgaagttagttggatgtggcttctctgcctaggtagccttgcacccctgggaggatgggggcctaagctggaagtggatttttctcatctagcagaagcacattcgatactggatacaaagccccatcttctgtttcagaagcagcttggagcatttcttgtttaactgtcatgtaagccccttaagcaatgcttttttcagagaggtatcatcctgataaattgtcaaatgcctctttcaaatccattccttttaaaaaaaatcctcttttctgtttattctggagtcactcatcatgcaaataatatctttgtgagaagtggtgttcctggagttggagaaggctctttagtagggctgctggtcagtacagtccctgaaaaacatgactatttataacacaggcaccagagggttcagagacgtgctaaaagtggagaagttgggggcaggggagtgctggcaaggatgaactttgcctatttcacaagttttgactaaagtagttctgaataagaaaagcgtttgatgaaatcttacctagtataaagacatattatttttggcctctcttttttctttcttctttttgttctttcacctttcccctgtgacctcccattccagctgagccctcttgttcccatttgccctgtattgttgatcttaaccccagctctgccctctcttaaatcctgttcttattcttggagaagactacagtctcccgagctctttctatatgccaagcactgtacttttatacattcatattatcatgaggaaatattcttttgcctattttacagatgaagcaagtgagattcagggaagttaagtaatttatccaaatttacatgcctactaagggatggagcaggagccagacccctgtttctgaagcatgtttgctgaaccactacactttagccacctactgtggatacctttggaaaggaggattcttttaccgttaccaaaaagatattaataaaaataagtccaggtgtggtggctcatgcctgtaatcccagcactttgggaggcagaggcaggtgggttacttgagctcaggagttcgagaccagcctgggcaacatggtgaaatcccgtctccacaaaaaatagaaaaattagccacgcatggtggcgcatgcctgtagtgccagctactccagaggttgaggtgggaggattgcttgagcctgggaggcagaagttgcagtgacctgagatagtgccactgcactccagcctgggtggcagagccagaccctgtctccaaatatttatgtgtgtgtgtgtgtgtgtgtgtgtgtgtgtgtatgtatacacatatataatttatatgcaaatatataatatatacatatattacatacatatatgtgtgtgtatatataatcaaatgcccataaattgaagattcattaaatacagggatagtcataccatagtaatgacgtagctgttaaaaagaataaggtagttcccataaatggtagaatagcttgattgtactaatccccctgtattttatgtagatttgtaagattcacaccaaattttttttttttgagttggagtctcgctcagtcgcccaggctggagtgcagtggcgtgatctcggctcactgcaacctccacctcccgggttcaagcgattcttctgcctcagcctcctgagtagctgagactacaggcacgcaccaccacgcccagctaatttttgtatttttagtagagacggggtttcaccatgttgaccagccaggatgatctcgatctcttgacctcgtgatccacccgcctcagcctcccaaagtgctgggattacaggcgtgagccaccgcacctggccacacacaaagtatttttaaaaactattgtaagtcaccagaaagcaagcaaaatcaggcagaaactggaggagaatctacctcaaaagacaaactgcggtggataaggtttgcaggtttgtagctttaacctgaaggtactcccaaagctaattaagtggccaaaagccgcagccttactgtattgcgatgttagagggcagaggtagaaactggcagagctggcagagcagtcagaaaattaagagggaaaccccagagaggagggagctacagagggcacaaacacccaaatctgcatatgaaattgcacaaatccttggttggctactaaactatgtgtctgcaaacctggtgaaaaagtagcagctttaagcctgaaaaaaactaagcaaagatcttggccactgcctaccatagggaagacagaacttggtatttgtgttcagccaagttagctgtctgctagaacaaaaattagtcttcagagaaatgtgcagaatctggaatctctataacatatcgatcatcatgtccagtgtcctatcagaaaccactagaggccgggcattgtggctcatgcctgtaatcccagcactttgggagaccaaggcagacggattgcctgaggtcagaagtttgagaccagcctggccaacatagtgaaaccccatctctactaaatatacaaaaaaaattagccaggtgtgctggtgggcacctgtagtcccagctattcaagaggctgaggcaagagaatcccttgaacctgggaggcggaggttgcagtgagccgagattgtgccactgcactccagcctggtgacagagtgagactccgtctcaaaaaaaacaaaacaaaaacaaaaaaaccccactagatagaggtagaaatgggaaaaaagtagataatagaagccaaactcaagatgatagagatgttacaattaatagacaaggactttaaagcatctaccataaatacattcaaagacttaataaaaatgtatacacaatgaatgaacagatagggagtatcagcttagaaatagtagctatgggccaggtgcagtgtctcacacctgtaatcccaacactttgggggcccaggtgggtggatcacttgaggccaggaattcatgaccagactggccaacatggcaaaaccctgtctctaactaaaaatacaaaaattagccaggtgtgggagactgagacaggagaatctcttgaacgtgggaggcagaggttgcagtgagccgagatcataccagtgcactccagcctgggcaacagagcaagatcctgtctcaaaaaaaaaaaaaaaaaaaaaaaaagagaagagaagaaaagaaataaggccaggtgtggtagctaatgcctgtaatcccagcactttgagaggcagaagtgggcggatcacttgaggtcaggagtttgataccagcctgggcaacatggcaaaaccccgtctctactaaaaatacaaaactgggcatggtggcacgcatctgtaatcccagctacttgggaggctgaggcacaaaaatcgcttgagcctgggaggtggaggttgcagtgagccaagatggcaccactgtactccagcctgggtgacagtgcaggactctgtctcaaaaaaaaaaaaaaaaatagctatgaaaaagagctgaaaggttagtggttgccagaggttgaggggaggagggaatgggaagtgattgtttaatgcatatggggtttccttttgtgttgatgaaagtgttcttgagctagtggtgaggcttgtacagcactgtgaattttaaactttaaaatggtgaaaattgtgaattttatgaaaagagaggtgaaaatacatgaactaaatagaaatttttaccagtaagctcaatagcagacaaagttaactgaaaaatagatcaatcgtatgtactcagtttgaggaaaagaaaaagattgaagaaaagcaaatagagcctcagagacctgtgggacagtaccaagcagtctaacatgtatagttggagttccagaagcaaaaaagagattagggcagaaaaaatatttgaggggataatgaccagaaatgttccaaattcggtgaaatccattaactcactgatcccttaacaaacactcagcaagataaattaaaacacacacatgcacatgagagccacattgctgaaatccaaaaataagaaagtcctgaaagctgcctgagaaaaaaagaaggtgcacagaaggaacaataatataactaacagccgactgcttatcagaaacagtggagagtagaaggtaaacgtattgaaagacaaaatatcaacccagggttctacgtccagcaaaactatccttcaaaattgaagcccaaataaagacctttataattaaacaaaaactgagagaatttgttgcaaagaatctgactatgagaaatgctaaaggaatttctttaggcttaagggaaataaccccagatgataacttggatctataaaaagaaatgaaccagaaatgatgaagaaaataatcagatagatccatctgtgttgatgtaaacatgtaatagtaataataataaatatttatatagcaattatttcaggaaggacacgcaagaaaactttaacagtgataaccttccccgtggaaaaggggaagagattgagagcttggagtatgaaaaaggagactaaattattattttgtgcttcttttgatcatttgaatattttttaatgtggatgtattacttatttttttaaataaatttttaaatgtcatgaaatagctaggaaaaatagagatacttgatacaagatgagaaaataatgttctgtttctcccttgtaaggaatatgacagaaatcgagacattgtagactgggagtcaggattgggtttctttcctactctgttagcaggacactgtgtcacgtgacaaaggctgtgaaggaggtatcagatcgcgctctctggccttgggcaccttctttccattgctaggtcttcttccccatccccagacgtccctgctcattcccggagcggcagctccaggaaggcacatcttgctctaaaatggcctcctgaacactcctgttcccacacactgtctggcttaatcttactccaaggcaggcagctgcagagggtgccagggctggttctgctcctgggttcccatctcgggtgatcaggacaccatcgtgtgctctgtcacccaagccagcagcctgagagtccgccttttaactcaccttgttaatgaccccaggtacgtttcattaggtcttcgtaatgaaatgtacctgggggtcattaacaaggtcaattgacccaaatccttctcaaatctgccgcctttctctgtcatgatttttataatctgcaccacgccccccacacccccaaccttttccaggatcaaattgagacttctccagtgtttgcagagtgaggtcctgtctttagcccaggccttcctagcctggcccctacccaggtccaaccttgttttccacatgtgagggtccaccctcatctcccagtgaggtcaggtctggccattcagcctccccttccacatgttcagccctcctggctttgcgcagcttattgctttttcctgtgttccttccttgtcttcacatagcaaatcattctcacctccagagatgctgtgtcctatgtcctagaagccttacctattccctagcatgctgaactgagtggtcctgtcccggcctcccataactcttgttaatgctctgtcctactcttggagagaccatgaagactgggggaagaggacagggtttggagttggacagatttggtctcaattctggtctttccatttactggctgtatgagctcaggcaagttgtttaatctccccagtctcagtttcctcatctttatggtgacaatactactgcttactttgctgagacagatggactaaagataatatatataaagtgcttggtgtggttcctattatagctttattcttacaacacttttttaaacattgtgttgattaaacatttacttgattaaatgtttttctctcccattagactatacattctttgagaccagcagtgcttaatgtttgtagaattcaacttttaatgagtttgaattttaacagagtacatttgctaagttaaaagagtgattatattaactttaattgtggaatttcacgtaatgtgaaattcaaagctttatatatattttcagcagagactcttaaaattatgttttcgaaataacaattttatctccccaagcaaaatgccacctgcacctttacaaacactttaccgcagttatgtgaaccttcattgctcacccttgctgcagatcattaaatgtatgcataaatagaattattaatgtttaccaaggtcttaaagtcctggtaagaaaatattgagtggtcaatatagaaaggtcacctgttagctcctgatgcttgaaaacagaggtgggacctggtgagcctgtcttcagctgatgcagtgccagcacatctgggctgggcagggcctccagtgccttctgcacaggttcacgtggccaactctgcttggacagtgggatctgctccctggcagctgggacacctgctccccactgttgagccattcctcttgccagggctgtttgagtatcagccactacattcctggccccctccttttagagagagatctctgattttaagaggcaaggtttaaagtaagacatttcatgtgtagtagcagatattattaactttgttgtgcacagtatgccttggatcttcttttcttgggtagggtacagataaaatgatggttctacgaggggtaagtaggaaaaattagtggttctggattctctccatgccttcactccattatagtcacagtggcaagatggagtattagcaagacaggtcctgagtgtggttgcggtctaatttaaacttttttttttagacttactctctcgcccaggtcggagtgcagtggtgcagtcttggctcactgcatcactgcatcccccagccaggctcaagcaattctcatttctcagcttcctgagtagctgggactacagtcatgtgcaaccatgcctggctaatttttttatttttagtagagacgggatttcgccatgttggccaggctggtcttgaacccctggtctcaagtgatctgcccgcctcccaaagtgctggggttacaggcatgagccactgtgtccaacctaatttaaactttatctttgtaagtgccagggtaatagaggctacccagtttgccattgtgctcacccaaagatgaaagtgctaaggttgagtggaagaattcccaattattaagcccctcctctccctgtgttgaaaattctccatgaaaacccatctctggaggtgtatcaatcagtgttatcactgccctaagccatttctgtcaaatccagtctttccagcatattgcatattccctgtcttgccagtgaaatgtggtaaagaagaaaaaagttgccacagaatgtaatttttaaaaccatagccgggcacggtggctcacgcctgtaatcctaacactttgggaggccgaggcgggtggatcacctgaggtcaggagttcaagagcagcctgggcaacatggtgaaaccctgtctttactaaaaataaaaaaggccaggtgctgtggcacgcacctgtaatcccagctacttgggaggctgagggaggagaattgcttgaacccaggaggtggaggttgcggtgagctgagatcgcgccactgcattccagcctgggctacagagtgtgacttcatctcaaataataataataaaaccataaaattcctacaaagtgtgaatatatatttatgaatgatgtctgtgtgtatccgtatacatacatccattcatatttctgaaaagctttcaaggagaatttttaaacatagcagatgcattaatttgcatacaaagaagccagttacggatcattcttatctagttatccaagtcaacagtgcctttttttttttttttttttgagacaaggtcttgctctgtcgcctaggctggagtgcaatggcacaatcgcggttcactgcattctcgaccacccagactccagtgagtctcctaccttagcctcctgagtagctaagaccaccagctacacctggctaatttttattttttaattttttgtagagatgtctccccatgttgccctggctggtctcaaatgcctgggctcaaatggtccccctgcctcagccttctgaagtgctgggattacaggaatgagccactgtgcccagcttaatgatgctattaaactacacctgttaaccttctacttgctttctgtggttgacaagtaattctctttgcatttctttttactaattcagatgggcttctcttttcttactccaaattattgaaagttatttatttgtgtaaaatattacatagacatacacacacacaatatatgtgtgccttatgcattttacaacatcatctgaacaaatatttattaactacctattgtgtttcagactctgtgctagacatgcgggatttcgcagtgatcagaacagtatctgcccaacagtcccacaaagaaatattaagcaagaataaaatctgtagccacatacctgtgtacattttttgagagcttactatgctctgggcactgtgctaacattttcaacattatttcatgtagcactctcaacaactgtgtgagataagttttatttattgttaccatttttccaaggaggaaaccgaaacacagaaaggttaagttacttgcctgaggtaacttagcattgatagaattaggatttgaacctgggtagtatgactcttaggtccccatgagctggcacacaggttgccaatccatcagttaaccttcccatcactgggtcagagagccaaggagcagaagggggatagaacttccccagtaccaaactaaggggctgagctgggatcgcaaccacaggttctgttccaaagctggggctctttcgacaaggccatgcccgccttgtctcttatgtatgctttttcacttgaggctgaattttaggtctgagtcaactgcattttgaaaaaaatcatctgcttgaagaccctgatgatgtaacaataaaggccattggaaaaccggcaatctgtgaatcttcatatagatgaaatatccaggttagaatttatcatcctaatctggatatttttgagagtgaaaggagtactgttatagatgctggggcatcaggagccagccaggacgtccaggcaagccggggcttgtggtcactctgtggacacgcagcatggtcattaatgcccacacaatgtgtgtattgttatttgtagattccattactctttggaatataaacctctaagcaagctaaaataactctactatgctttaattatgcattgttggtaaccataacaataaatccttggccaattccaatccaaggacataagcatttagagtcatttttaaaggagtgctccgatggtttagcagtcatgtaaatgcatttatatgtaacagaagacaaaaacaataattaagataaacataaaactcatcccttttgcctacagaggcaactctatttttagaactacaaatttgggctggatgtggtgactcttacctgtaataccagcactttgggagaccgaggtaggaggattgcttgaggccaggagtttgaaaccagcctggccaacgcagcgagaccatatctatacaaaagaaaagttaaaaacttagctgggcatggtggcatgtgtctgtagtcccagctactgaggaggctgaggcaggacaaccacttgagcccaggagttcaaggctgcagtgagccatgattgtaccagtgcactctagcctgggcaacatagcaagacattatcttaaagaaaaattgtatgcatagcctgagtacatgatttgaatatatttaggaaatagataatgggataaaatattcaaaagtgaaattatgcaggaaaattccaggcatgtgattgtcatatacatagttgaacatttctattctctatgtagtttagactttaattaaacagaataatctgactttaatctctcttgatactataaaagtaacttgaatttgttcattttttgttttttaatcatgaaaactaatgcccaaagtacctgtctaactcaaaataattgtttcttttttcacacaaagccaattgaatagattggacaattgcatacttaagatttaatatatttgctcatcatattatgggttttaaaaaatcatttatcttggagctaagtacatttcactatggttttttatgttcattgtcgtaaaatattatctttaatgtttcactaggttcactaatgttaggctgagggtgtttattgttgtatcagatatccttttgtgttttatttaaatctatatttactagttttaaatagtttgccttattgctaaggctagtggaaaatagttaaagtgtgagaatgtggtttttccctgtagtgttcttttgagtagttgacagctgtgaaaacatttagcaggcttccctccttttcagcgttggttaagctctgcttctaaaggagtattcctagcagagcttgccacagtatatccaaaacattgctgtattacagacgcaacatggtttaaaaggaaaaattgagtgtgggtttcaagttgacacatgataaaagtagccctgaagtgttcaattagaaactgaaggcctggatctgataacttcatgggcagtgcccctgctcttttgtcttacgaccaataggattttgactgctcaggaaatttgtatgcatgtacccagatatagacctaggcacctaaatgcacacgtggatatatacgaatatatggtggacagtgcagatccaagctactcctgctaacacatttctggaaaacattccctttatgggaggacttaacaaaaaaattagtagctagttttactttggtttacatatattgtttttctaatatagaattctcattagttggttttatgaatcatatcaccaaatgaaaatttgaaaagtatgtaacagttttctattgagcgttctctgaatattcttgccttcagtcctgctgggagccttttctcagatcaccagtgcaagcctacagtcatacattgtttgtagttgatacaacctcaatgatataagttttttgatgattttaaaatatgagtaattaatcatttataacctataggttaaaatgaattataagtggatgaaggtgggaacccaaatgaatcaaagctatttaagtttggtattgacattgtgcatcttcccattatttattataccaaaaaaatcactttatttcttaaaaatagtacaacacggccaggtgcagtggctcacgcctgtaatcccagcactttgggaggccgaggtgggtggatcacgaggtcaggagatcaagaccatcctggctaacacagtgaaaccccgtctctactagaagtacagaaaattagccgggcacggtggcaggcacctgtaatctcagcacttttgggaagccaaggtgggcggatcatgaggtcaggagatcaagaccatcctggctagcacggtgaaaccccatctctactaaaaatacaaaaaaaaaaaaaattagccaggcatggcagcgtgcacctgtagtcccagctacttgggaggctgaggcaggagaatggcgtgaacccgggaggtggagcttgcagtgagctgagatcgcaccactgcactccagcctgggtgacagagcgagactccatctttaaaaaaaaaatagtccaacacaagaaggaaagaaggtacagaaatggaaagttaagaatgaatcagtggagtaaaacatttctgagattggtgcattttccttttggaaatgtcattcaaaccatatgaaattaaatttggaaataatgttctgcagtctcttgaatgggatttaaaatatgacaatgcagaaaacacatatggggatgaaaacccataggacatgtctcaaggaggacagacaccctggggaagaacacttgtgagggtaccaggctctcagacacaaggaaagaggaatctgagggattgctgggaaggattctcatcttatgaccccagctgtgggtagatttggctggggagcccattctcattgcagggggcggtggcctcagccctgtgcatgctgactcttcagtgctgtgctctggctgaggcgtgcctctagtgagggtgaccctgggcaccgagcatattcagtcaccatcagccaaagctggttgtaggagggctggcggtggtcttgggaatgttgcttgaatccatcttggggtgaaaatcagagtattggctcatttctattttttatgattattgttattattattattattattgagacaggatcttgccctgttgcccaggctggagtgcagtggcacgatcacagctcactgcaggtcacagctcccaggctcaagcaatcctcccacctcagcttcccgagtagctaagacttcaggtgtgtgccacctggcctggctcattttttaatttatttttgtagagatgaggtctccccatgttgtccaggctggtctcaaactcctgggttcaggtgatccttctgcctcattcttcccaagtgctggggttacaggcatgagccaccatgcccagcctctccttcctgcctgcctgcttccctccctccctcccttcctccgttgctcttttattttctttccttttttttcctgttgctcaggctggagtgcagtagtgcaatcttggctcactgcagccttaacctcccaggctcaaaccatcctcccacctcagcctcccaactagctacagctacaggcatacaccaccacgcctggctaattttttattttttgtagagccaaggtcttactatgttgcgcaggctgctctcatttctaatacactgagctcaactgcttgctgggtgaggcctgcatgaggactttactcatgggctcatagaagcccttttaagctgcttagtgtccttagagtctccagaggcatccctaacccagaatcttttgactgtcctctggagagaaaggcagtaggtctgtaccaagaccaaggggcttgaaggcttggacgctctgcttccacctgcctctggagtggccagaagtaatgcctgttctcatgaccagccagtttgcctcactgctccggtgccaaaggccaagttttgattggaatgatgtctgtatattctgaataaccaggaattttgtttttctgatttacagatcttcaggcttttcatcagcatgatttgccatctctgtctttgtcatctagggtctgtaattatcctcaggttttctgccaatacctgcattttcaaccagttagaaaaagaagagctaaaacaggtagaagcctgaaaccaaggggcatatgcatttctgaaacattttcaagaaattgtctcaattttatatttctgtttataattataatttcaatgtccagtggaggaagttgtgagactcaatgtcagtagctaccacttactattctgtgcgcctcggttcagattgtttggggcagtggtgttttatgttgtgggtccaaacccatgagtcatctgggaagttaatttattaggtcacaatgagcgttttaaaaaatgaaccataggcccggcgcagtggctcacgcctgtaatcccagcactttgggaggctgaggcaggtggagcatgaggtcaggagttgcagaccagcctgaccaacatggtgaaaccccgtctccactaaaaatacaaaaattaactgggagtggtggcggcgcctgtaatcccaacttttcgggaggctgaggcaggagaatcgcttgaacccaggaggcggaggttgcagtgaatccagactgcgccattgcactccagcctgggcgacagaacaagactctgtctcaaaaaaaaaaaaaaaaaaaaaagaactgtaacataataggaaatattcaattctgagcccatcacacattttgtcttatgaaacttttggttttttatatgtggtgtatgtatgtatatgtggtgtatgtatgtatatgtggtgtatgtatgtatatgtggtgtatgtatgtacatgtgtatgtatgtatatgtggtgtatgtgtatatgtggtgtatgtatatgtggtgtatgtatgtatatgtggtgtatgtatgtatatatggtgtatgtatgcatgtgcaagctctcactataaatacacttcttcctgtgggttgcagtaaaaaaaaatttgaaaactgttaccttaagactatttattttaaaaattttaataggtacatagtgtatatatttatggggtacatgaaatgttttgatataggtatacaatgtgtaataatcacatcaaggtaaatagggtatctctgacctcaagcatttgtcatttctttgtgtttcaaacattccagttatactcttgtagttatttttaaatatataataaattattgttgactgtagttatcctgttgtactatcaaatactagaacttacttctttctatctcactggatttttgtactcattaaccatccccagtttccttcctctaccccactacccttcccagcccctgataaccaatattctagtctctgtccccatgatttcaattgttttaactttcagctcccacaagtgagtgagaacagttgaagtttgtctttctgtgcctgacttatttcacttaacataatgtcctccagttccatccatattgttgcaaatggcaggatctcattctcttttatgactgaatagtacttcattgtgtatatgtaccacaatttcttgatccatttagctaccgatggccccttaggttgctcccaaatctttgctattgtgaatactgctgcaataaacatgggagtgcagatatctcttcaatacactgccttcctttcttttgggtatatacctagcattgggattgctgggtcatatggtagttctagttttagttttttgaggaacctctatgctgttctccatagcggttgtactaaattacattcccattaacagtgtacgatggtttccttttttccatatcctcgctagcatttgttattgcctatcttttagataaaagtcattttaggccgggtgcagtggctcacgcctgtaatcccagcactttgggaggctgatgcgggtggatcacgaggtcaggagatcgagaccatcctggccaacatggtgaaaccccgtctctactaaaaaaatacaaaaacttagctgggcgtggtggcgggtgcctgtagtcccagctacttgggaggctgaggcaggagaatggtgtgaacacaggaggcagagcttgcagtgagctgagattgcaccactgcactccagcctgggcgacagagcaagactctgtctcaaaaaaaaaaaaaaaaaaagtcattttaatggggtgtgatatcttaccgtagttttgatttgcatttctgtggtgatcagtgatgttgagcaccttttcatatgcctgtttgccatttgtatgtcttcttctgagaaatatctgttcagatcttttgcccagtttttaaattagattattaaattttttttttcctattgagttgtttgagcttcttatatatcctggttattaatcctttctcagatggatggtttgcaaatatttttccccattctgtgggctgtctcttcactttgttgattgttttcctttgctgtgcagaagctttttaacttgacatgattccatttgtctatttttgcttcggtcgcctgtgcttttggggccttagggcaatttctgatccagggagagggctttctttaaggggtgtggggcatgaataagccaccagcaatgtcagggtatcttctttcctgtggctgagaaattccctaatttaaacttaggattctgtttgccatgaacatgctattaaaatagtggcaccctgggacactgtggggttcagtgggcttttgtgagctatcctgaggtcctaaccatcatttgtgacattttttccatggggaaaaattcattttcagttccaaagaagcaacttattggtgaattattttgagcaggatcctgtcataatcaggcactgcttttatattttttctgtattcagtagtaaatctacttgtaccttaagcagtcatcgcactcctttagccccttttaatttctaatgaggagtggtgtgttataggagtttggggtggcctgggggaagaagggttgctgaaggatggagctcctgaaagggagggttaatgaggatgtgtgtccaaagggtgaatgtctgtgctcctcaccagggagaagggcatcttgcatttacaatgatttataattcacctgggtcaggttcctctgactataggagccaattggttacagaaatctttttttttttttttttttttgagatggagtctcactctggcaccccggctggagtgcagtggcgtgatctcggctcactgcaacctctgcctcttgggttcaagcaattctctgcctcagcctcctgaatagctgggattgcaggtgcccgctaccacacctggctaattttttttttttttttttgtatttttagtagagacagggtttcaccatcttggccaggttggtattaaactcctgacctcgtgatccacccaccttggcctcccaaagtgctgggactacaggcgtgagccaccacgcctggctggttacagaaatcttaatataaggagctcgttacaaaggcaagcataccctagatctgcctgctagccctgcgatagctacttctcagtaccttctgtgccagacactcttctaggcccagggatacagcagggagagaggtgggcagggccccttcccctctggagaggctgctgctgggccctccgcacgctctggcctcccatgctttgggaatgcttgtcactgccaagctgtgcagtgcatcaccatccatggtgctcatgggcctgaggaccactctgcccacacctaaggggggctgggtggccagtgtttgaaaggcttataagaaagatcacaagaagtttcttcttgagaaatgctacagtctttaaaaacaaaacaaacaaaaaactacttagaattttgatagccccagctcaagaaaacaataggtaggacacaagcttgttcataggcagcagagaggtccaaagcaatgtgcctcaaatcaagacgtgtggctctgaaaaaccttcttagggaaggctcccgccccacctagagcttcccaattccatagtatctaaggccttgcaaaatctacatctgtcacacgcccccccggccccgccccccatcacaactccatagtgggaagaacttatttcagtgcctatttttcttgaggtttataaaaacaaaatgtgtgaagggaatgtatgctgattctcttgggactaattaaacaaacagattcagagaaagaaagcagagaagatttaggacagttaaaatgtaaaaaatgtaattttggggataacagccgtcaatttttccactcgagtgtttttccaaagggcagagggcaagaagcatcttaagtcctctcgaagctgagacacatttcaactggagatattagaagcaaatttggtgcccaagacaggtgccagattttaattacagttggcatttctgagcatgcttttggcagaggtggccatcttgttggaaaagccatagattttgacactagcagtatgggtgcccagttgagaacgattgcaaataatttccctcctattttcatcttgttggttgtgagagaaaacttcagtggctaatatttaaacaagatattctctgttcagaggaaacagttcattggaattgtcttggtggcttggtgtgttggctctgggggtaataatttctatcttaaagtctttaaaaccagttaaaacaataaaataggatatttcattatgagaaatgaagttggcatgcaccaggttttccattaagttccaggtcacagacaaataaagaaagtatgttcgggggggaaaaatcctttttaaaaataattagggagctgtctgttttgttcaccagatggaaaatccgtagttgtgggtggtctgtgttggagagggcatctcacaattggcaggactatgcctttaacttttcaagtcctcggacaaaaatctcaacgccatggactattcagaaggctccgaatgttcatcagtccttccaggtctgcttttctgaattttaccagttttctaacaagagtgtgtaagcaaaatgattatggaatgccgaaataaatagtccattgttcgttgaattctgaaacagcattcctgctagccctggttttttgtgacttttcttgctgtcaataccttatgatgataatctgattagtggagctgcctgcgttactatttaaaggcccctttttcttacatttctgtgttccagagtagatagggcagccagatgtgctaacagcataagaaatcatcataagcttgttatttattgaagatggatattgcactgttatcagtgtttagggtcttttctacacttgctttgattctggtcaaattaattcaataagaaaatgtacttttcttactcctttcttgaactgataatagaatgttagctacctagtgtcactagtattttttttatctacacatcaaggtatcatttttttctagctcagtcttatgttttacatggctttacatctgcaagttggactttgaaatgaatattttatgtttgaacataaggatatatatatttttatatttcattcatacatttaacccatccccaaaattttcttaaaaaacttaataattacaggagatgtaaattaataaaatcatctaggatgctaaatgcataaactttcaattgagtgaaaaaaagccctggaacgtaaatcatttttctcggacagccaatgtgtttggctttggatgtacatcagattctgcctgtgcatagtaaaaatggcaatgatttattagttccatctccccccagcacagatgctgcacagtctgtcccttttctgggcactaaacagtgggttttaaaaaacataatttcactcaagttttccgcttgcattctgtgttgtactattaatagcaaccctttgttattcatgccagctcgcttctagcataagacaatgatgtggggaaacggttttaactaaaatactactaattggcacccatttttcatatactggtgcaggtgcagttctgtgaggaatagaagcacctctaaaaattatgtcatgaagatagaaaagctaaacagttacacagttaagtaggtgtacctttgcaatgtcattgtttctttgaaaaatcttacttatttgccgataagttgaagggtggggaaaatttggaatattgatggaggacttatgtgttaaatgttctatgagtccaccaggcgctgtggctcacgcctgtaatcccagcactttgggaggccaaatcacgcagactgcttgagccgggagcatgagaccaacctgggcaacagagcgaaaccccatctctacaaatgatacaaaaattagccacatgtagtggtgggcacctgtagtcccagctactcaggaggctgagatgggaggatcacttgagcccagaagttggagtctgcagtaaacagtgatcatgtgccactgcactccagcctgggcaacagagcaacactttgtctcaaaagaaaaaaaaaaaagttatatgatgcttcatgaaaaaaaaagaaagttttcagcctgagcaatatagcaagacctcatccctacaaaaaattttttaaaaatcagactggtaggccaagcgcagtggctcacacctgtaatcccagcactttgggaggccgaggcgggcggatcacgaggtcaggagatagagaccatcatggctaacacggtgaaaccccatctctactaaaaatacaaaaaattagctgggcgtggtggcgggcgcctatagtcccagctactcgggaggctgaggcaggagaatggcgtgaacccaggaggtggagcttgcagtgagcagagattgcgccactgcactccagcctgggcgacagagccagactccgtctcaaaaaaaaaatcagagtggtatggtggcgcacacctgtagtcccagctactgggaaggctaaggcaggaggattgcttgagcccaggagtttaaggctacggtgaactatggttgtcccaccgtactccagcctgggtgacagaatgagaccctgtctcaaaaaaagaagttttcaagaggggaagaaataagaagagtgttagaaacctcagttgcccatctactttcctctccttgcccagggtgacagaaactgttgccaaattctcactggcagcaacttgagttttgatttggctcaggtacatgtgctcttctagagagtaaggtcagcacagaggctgctggagggtgctggaggctgcctccatggactctagcaccacctttcctcgtcctgtagctgaaatccttggagtcattcttgcctccactagacccttggattctgtgcatctccacatggctcccagccattgtggctctttttttctgggactctcctctctcctgtccatcttccagaagtagctttctgaacacagacgtcattgcgctcctctccacaagcagcagtcactctcaacactgaggaatgaagaccttacagtgttctttacaccctaacccaagattaccttcccagaatcatcttcctaccccatgtctctgaccttccaatcacattaaaattctcagggtggtgagatactccagctcctttctgtctctgccatggctcatgctgctgcttctccctacagagccctcctctcatcttccttgagatcttgctgaccaaatatcttctcttctgatgacttagcagtcacccacactgccgtgggccagcagacacccttcctctgccttccagtagctttgcccaatgtgatctctgctctttgtaccctgtgctgtctcccatgttagatccaaccacctaggtcatagcgctactgctggtacctgattgcaggcccagcatctgtcttggtgccaagcacatgacaagaactgaataaataggccaggtgaggtggctcacgcctgtaatcccagcacttggggaagccaaggcgagtggcctgacgtcaggagttctagactagactggccaacatggctaaaccccatctctgctaaaaatacaaaaattagctgggcgtagtggcgcatgcctgtaatcccagctacttgggaggctgaggtgggagaatcgcttgaacccaggagacggaggttgtagtgagccaagatcacaccactgcactccagcctgggtgacacagcgagaccccgtctcaaaaaagaattgaataaatattttttgagtgaaatggaattctgggttgtggctttccatcagttaagattcttggttgtggccaggtgcagtggctcacgcctgtaatcccaacactttgggagggagaggtgggtggatcatgaggtcaggagtttgagaccagcctggccaacatggtgaaaccccgtctctactaaaaatacaaaaaaattagccaggcctggtggcacgtgcctgtaatcccagctacttgggaggctgaggcaggagaattgcttgaactcgggaggcagaggttgcagtgagccgagatcatgccattgcactccagcctgggcgacaaagcaagactccatcttggggggaaaaaaagattcttggttgtaagcaacagacaccacatctggctttggcaagagggggttttcctggaaggatatggacacattcacaccgtcggtggaaagcaactgtaggcatgccgacatgaatccttctccattgtgtccctgctcagccacgagaacagtgtgctgccagggtgctcagtctgtaactctgctcaggatgcaggctccagggagggagtgtccaactgggctaatagggcccaccctttggctctgggagagctgggctccttgatgataatcccagcacactgtcagctgtgggtaggatgaggcaagttcctcagggggtgaagtgtgttttgggatagtcaacagccagtgactgttcaccacaggactaaaccttccatttccagtgctccagtgccccaactggcctgtctggtgtgatttgccaagtgttctgagcaagcagggaagttgtccattaaaatacagatattggccagacatggctcacacctgtaatcccagcactttgggaggctgaagcgggtggatcacttgcactcaggagtttgagaccagcctgggcaatatagtgagaccctatctcaattaaaaaaataaaaagcagatatcctgggaagggataacactatagcccctgctagccagcattgatttgccaaaagtaggacctgtgggtgcaggatccagagtagccatggatggatgaggtgcgaaagggtcccgaatgttccagcaatgctacccaaatggcaagtggtgtcgtggcctctttcacctccatactcagggagaagccactcagaggcctccacataacaggcaggctctcgcctgggtgtcggaggtgaggatgctactgaagcttattgcttcttaagaatcaatcaaatcaaaacaatggatgcccttctcccaagtggaagggctgtgctggccaccttgtatgactgacacaaagttgggaagagttgcagtcatgagctggggagacacaccctaaaagcagatgagctggtggcggtaaataacactcccatgacgacaagtgggctttgcacgtgtgtggtagcagggcatggccctgggggaggtggggctacctgaggaaaatcacaggaggcaggaatgtatactgtttgttgggaaaagacaagccaatctgaagggcaagggtttgtagaggggagtggtggagagtgaggttggaagggtgtttgggtccagttgtagacagccttgaattctaggcaaagacttcagatgttgttttctaagcactaggagcacctgtggatgtttcagaatgggagtatcatgatggatgtactattttttaaagagcaggaataagcagcaggccactgctaaggaatctgtgtcatgaggctgttagcctggggacaaggaggaccggccaaaaaaaaaaaagtcctgtatataagggggagcacccagcacacttaggttccagacctccattcctagcaactcacctgtaactcctggcaggggtctctgcctccctctactcatccaaagatcatggtgcttgttcaccagccttatgatgatccaaagaaatagtgatctttcatgtttaaataaacctacttaattacgtgcatctgtttggaaattcagacacaccacatgagaagctactgggacttttttctccttttcttggcttctcatttgttctctagctttttctttttttttcatcctggccagttattaaccttctcctccacttttgagtctcataattgtccagatctcccaggacgctgacagtgtggttttggttcacttgttccttctcctgctcaaatttcaattgattcaagggtgatatgctgggtatgatgggctggacatgcccattttcattcaactcatccataactaggatataagtgaggatacagatttgggtgttatggccaaaagatcttcaaatacaatgactttatcaaggataatttcttcccccctcacttgaaacatggttaggtggtgcagggctgataacgatggctcagtgaggtctcaggctcctttagctatggttctgccaacctcagcacatggcacacatcttccccaaggcggctgcttggtttgctcccaccacgtggggtagggggacacatgccttcctttatggggacactatatttctgctcaccctgaccacatcccatcaatcagaactttgacccatgaatacactcagatgcaggagaggctgggaaatgttttccttagctgggcatccatggacctctccctgggtccatcctagagagtggagtagcagcatttgcaccccagacctgaggggtagctgaggctgggctggcagtggggagtgaggccaggagcttggatgtgcaggctggcatgtcccacacatatggggcaaagaggaggggctggctggggctcgtgtcctcctccgtaccctcatcccaagccccagtgcggtagggtgggctgctccaacccaaatcttcttctcccaagtcttctctttcccagcatattatgctgcttccatttcaccatagtttcactcactatcaaggtctccaaagcaatcccatcatctacatattacttgattgttgtgtacagggtattgggtgaaaatgaaggtgggcagagcacatagcctccaacctcaaagccagtaatgtgccagatgaaaggtaagtcacagtctttagattcagtagcattttaacaaaactaaaatgtcaggccggatgccgtggctcacgcctgtaatcccaacactctgggaggctgaggcgggctgatcacgaggtcaggagatctagaccatcctggctaacacggtgaaaccctgtctctactaaaaatacaaaaaattagctgggcatggtggcgggcgcctgtagtcccagctactagggaggctgaggcaggagaattgcttgaacccgggaggcagaggttgcagtgagccgagatcgcgctccgaagtccattctttctgtgcagtggctgatctatcagaagaagaacccccttccccaccaggcctaagaacccatgggagtgatggcccagcactatggtgttgcatttctttcttttttttttttttagacggagtcttgctgtgtcatccagggtggagtgcagtggcgtgatctcggctcactgcaatctctgcttcctaggttcaagtgattctcctgcctcaacctcccaagtagctgggattacaggcacctgccatcatgcccggctaatttttgtatttttagtagagacggggttttaccatgttggccaggctggtcttgaactcctgacctcagatgatctgtctgcctcggcctcccaaagtgctgggattataggcgtgagccactgcgcctggcctggtgttgcatttcgttactggcaagatgatgtatgctctttcacgtgcccacatgcaaaggtgtgactcatggaatgaagacagctcagcaacctctagttgctgggacagaaatgcaagtcagtgggctctggcctttctcccaggctgtgttgccaccttggtggctggaggggcgctactagggggtgtgcttggcagagcctggggtggcgtcctctttcatcccactaaataacacattggtggcttgatctgccatgaagctgacaatcagagcaagtatttgaagcctgggaagctgtgtgggccttgcttgtgggacctggtgtcagctgatgacgtggccctgtctgggtgcccgtgagtcagatggcagggatggcctgacatcatgaacactagctccacctacgtcacattggacttgactctttacagagcacctaggaagagatattgatgagtgaaccattgcccagtcatcgagttaattatttccccccagaaaggttaacatactgaggacagagagggcatgtgtaggcggcagggcgcacttttcatttagtctggttcgcaggtgcggtcaagacgattccttattgtcttggagccagcccttttaagccttcctgcacagctctgtgacagtctcgcggggagacctgtgaggccactttccttttttccagacccacccccacctttgagattatcactcttcctgctttgttttctgaggctttttggctttttagtttatttgtaattagagcagaaaaggtacagtaatcggatagaagggttgggagtgatagaatgagccaggatgcggtggagaaatggggtggagaacccccagaccttagggtggcgtgtttgtcagggagtagaccagggtgcagttctaggcagaccactagatggcactcacacattggtgttcagtcgggtccacggcactttccactttgggcttctgtaaaatctccccatgaactagccaaagctttgtatctgtcatcccgccatttgtccctctaacctctcttgatcgtctacagataggtatatatatatgttcctctctagttcatttttctcttaacatttagtgaccttaaaaacctggcagaaataccttcaaagcctcccaccttgttagctgcattgccgcatttttactgttctcctaagccaatgtttacatggcagtaaatccatgtttagagtaggtaatagagaaacctgtttctctctcagtcactctgagggtatgtttgataaagaaatggaaattgagaggatgagttattaaaaggattaataggtaacaaatttttttaaaatttccattcaaaattatgggttggtaaattgtaagatacttaaaattaatgagttgttttatcaaatcattttctgttgttagagaattttcagcaagctgagattcaaatgcaaaatgtcttattgcatactgctggctctaggaaggaggagggacagacaggaaatcatggttgatgttatctttaccaaggtgcatgtggtgtgaaagcaaaaccccatcttaaattcatcatccgttctgatgttgcacagaaatgaaaattaatttctatatgtcaactaaaatggattctgctcctgcctggttcaattctgtcttagctgcgtggacatcttggggagctgctctgatggtacatgcagacgtgcttcatctgtgcacttcttagctgagataacagtgctccgagccccactgttaaggttaacctgtatactgcagaaggacaacagatggaaattctggtttgcagccactgcagaaaaataaaaacatgttccaaagggaaaaggatcttgtatttctgcgtttgaacctttgatccgcattcacatctgaagggagggctaaaccttttggtggagacacatggctttgcatctgtgaaaacacagctgtatagagcaaaacaaaactagtggaaaatacaatggttttgctgtgtcaggctcaccgctaatgcttgaattctatataaatattgtcttttgatagttctttcaaaaatctttcttgactttccatataattgtccaataatgttattcttttaaattcagatttggggctttttaggattaaggcacaaatgtctcttttcttttaaaaaggcagtaaaataaacagattgtagttagatcataataacatctaaattttgacctaattagagggggagatggggaaaaaaactctttaaaagaagattaaggtaaagttctaactttatccttgattctgaattttttttcttttttggaaatattgcatacattttatactgcaagttacaatgtgaagggcctttgaagcactctaaagagacttagctgctttgttttgagcaattaaggtttgttattgagtgaattaagcagctctgctgtggctcatctgtaaatagtggtcttcagcgagtttcttgatccgcttttcccaggaacagaagccaagtcggcttccttaggagctgctcgccctgagtctccatgtttcctcgcagtccggggcagaacccaagcccgtgccttcctcgccctgccttcggagtttcctgctattgacctggcggggcgcgccagccctccctgcccgctggtgccgcggtccctctcggctgcagcagtggggcacagggacgtcatggacaaaagacgaggatgccagttcgatgtgcgagcagaaggccgcctgcgtgcgctctgcagagcaaccggcccggtttcataaggggccgccggcaggggactgccatggcgccccctcctaccctttttggcaccagcagcttcatccgcaggcccactcggggtgaatagtgtgggagctctcaagagaaagaattttaggtttgtcgatagtaatcaccaccttcagcgctcctcccactgctggagagaccgcggactgggtgacaagtcttccaggctcccagaaagtttctgctgcaaagcgcagggtccgcctcccacttccaggagggaccaggagggaaccatcgcgaaaccccgaggctgccggggactctgactgaggcctttcctcctgtgtccctctcccccacgccggcctcccctcctttcaactctctgcgctttgaaaccgcggagttggggtagctaggccctccagcccggcgacaggcctcggccacaggcagcggggcggggtgtggacaggaacaaggaggtggggtggggaggaagcctcgggcagagcaggttctctgcggagtttcggcagccgggtttatccattttgattaaagaaaagtaaaaaaaatcccccaaaaccaaacaacaaaaaccctctcccaacccccaacccgcctccacagctgcattttgttcctgggactgttggtgtcaccagagcctctttttttatgcaatcctagactccattgcaaaggacttgtaaagcctattaatttttcaggcaaaacagatcaagcctgcctttgatgctgctgtttcctaatttagtattcaaaggtaaagaatcctactaccgtctcttcactttttacataattaaaagagatttttcccccaggggcaaagaactagttgcttagtattttttgaagtgaaaggtctaactttatatcacatctgtttttatgctctttcctaaacataaccaatatttactctttgctggtacttagttgcatgctattcacccttgcattttaatttctgacagagaggggattagtattcctcttctaaatcatcctctaagctatgtgtgtgtgtgtgtatatatatatatgtatatatatgcgtgtgtgtgtgtatttctcctctaacaaactgagagtgcaatttaaaaaactgtagaatcagtgattgccctaacttgtgcatgactcttgatttcacacaggagcattcaaaagttccgttaagtgggctttcacaggtttccatctgctgtgtttaatagcaaattgcgacccttcaaaccacttcaaggccttttgtgttcttatctgtgcatttcaatacttgctggggaagtgccttcagtttcactacatatgcaaaaagccaggcttgaattttttgacacccccttttcatttgttggtggagtcctgttttctattgtttgcttgttgatgttggcaaaagtcatttatttaatgatgccaggaatactatgccctattctttattggcaggaaatcctaaaacatccgggagtagtttaaaaattaatgcatgccgttgaaacttacatattggcatagttttattttcccatcataaggtagatgatattttaaaggtattatatagtaatagtcaccagaagccaattaaaaccactaggattctatcaaaaacctgtttggcggcataaataattgatatgtggaaataaagcagcattctctgggcaggggcctcctgtacagacctgggtggcgttagcagtctctcttctgtgaaccagggggcgatttctgggcataatatcacctggatttaaaaaacttaataataaggccacacacgcatttttaaaaaaacttcccttgcctgtggagacagagaggagatagcgatgttattttcaggtgtttgagcttcttagagaaaaagaaacaaataccagactccttaggagctaggtgcgaatggaataaattgaggcactccagcgacacatccagcttgttttaaatgatgtgattaaaaaggacatctgagaacaaatttatgaagttgttatggcaactgaaatacttggattgaaatgtgtgtatctaaaacatgaaagattgcaggaagccggagaaacaagcaaagcattgtgtttgggaaaggcaattgaacagtggtagccaaatattattcctctgtcggtcatccttcagggtaactgcctcggtttccacttttaaaaacgtgtggtgattgatgctttcatggactctgttgccccaagtccccaagccttgtaccagcgtttgctcattggtcctttgacctgttgagaacacaatctctgtattgtgttcaatgcagggatgcatttagagttgcccctgcatctacccattaagtttatactcctgtgttctcatattaacgtctgtgtttgcgaatagtctctctagtctttgattcactaactcccccaattctaacccaccaatggccaccaacaaacagccacactcaaaggactcaacatatttaaatattccctagaattctttgctctgttctaaaagctatgtatcccgtctacataatttgattctattgtaatttctcatggttttaaaattttccttaccagtacttgtaagagtattgaataattgtttctttcaatcacaggcaaggatatttaaaattaacatgtggaaatgtgtgttgcagtgtgttgaaaaatcagtacttgaagtcacatctagaatgcttccgattttttccatcattagatttcagatgcagtgtccaaaaaaattgtttttaaaaaatgttgctacaaatttcttgcaatatattttgggtttttcactttaaatgaaaaaatagttaagtgtcaattttagtgattttagtagaccatcccattaaaaatatgctattttaattgaaaaaaatttttgacaaaacacatttacaccgaaaaattcaaacaaaataatttcttctttaacaatattgattgttaaatgttgattaccaagttatttggtctccttaattttaagcataatactctttactttgaatagtcttaatccctaaagcaaagcaaagtaaaagagaaaaaaaagtagaagaatttccagaaaattgtaattcccttaaaccatgaattagaactttttactcttactgtagttactctagtttttttagttagacatgagggtacaatcaaacagcttcttttttgtaacagattgttttcctacttcttgaaaaactgagatcaaaacatttttctattctgttgcaaaattaactgttgttattctgtcagacgagttattcactctaaatgtctttttaaacctgtatatttatttttttatccctttttgcatatgcacatggaagtgattccattttaatataacttttttattttgaaaacccataggttgaagatgatataatcagagtaataataaggatgctccaagtatattaaacataagaatttggggtctttgttacggaaatagatttcctttttcctttctttagtcttactgttttaaggattttttttaaagtatgattttgatgcttccaaagtggttgctattttatttcaggtgggtcatttgatagtttgttgatgttttcaaggtctctaaacaaagtctgatgtgttaacagtcttattaacgatgttaaaatagaattaacagcttgtggatgcctccagagcacaatagcctgtcagcctcccctgcccccttataaattgtgcccctgctgtcatccctttgtttcaggcccaatcagcaaactaaacttttgtgaagagagaaggcagttcaagtgtttctgccgcagctgaagggaggagctaatgtggaatttattgggagaccaatcagtgctggagggaagaatgaccccaaattggaagaaggactttgttgacccccttggctccctgacctttccttgctattttgtccctttaaagaggtttactttggttgtcgtttactttgtgatgcttttagtaaaagccccagaagttttaaaagttttggatttaagatccctctcagcacagatttaattgtgccgtgtgattttgagtaacttgagtagatgttaacactcagaattattttttaaaaatctgacacaagctattaataattttttaaaggagtagaatttcattgattctcttgagccaaaatagattctaaatctcttctagtatctctttcctgtagttactttcatagagaatcagattagttactgatgttagactattggttctatttcgttgaatttatgctttaaaaaatagatttgtgtattccaaatctttaaaactttttttttttttttttttggtcaggcagtaattatagtgagtcagaaacaaatatttttagaggaaccctttttttttattagtattactagtaacaaatttgacaaattgtcacattttaaagtacagatttatgggatagcctgacaaatggataccacttttcctttgctactgtccaatttaataatttataaagtgtggcatatttgtaaaatagttacccattctcactgagcattacaccagttttggtaagggatactgagacattgttaagaattaagtattttttagattgcttgagcactttccttgttcccttatcagcattcttctcccttgtaatgtggtttgttgcttatatttactttgcaaccggccactgttcaaggacttcagacagtgctgaggtccgagatggtcactgctggtccaaagaacaaacatctcaggctagatgcaggacactaaatatgttcttcaagccaaggttaaataaaattactcaaatgtagccaaatacggggaatgagatgcagttaatgaattgtggctttgaaatatgatcatttgccaaggaatatgctgtgatgaaaacggagcagtgtaaactcagcacttctcttagctcgtagtgagctgctcaggtaaaccccgaggggaatactttcttctactgaataaaccctaaagataggcatccattgattgaacagtgtctgaaactggagcaaacagggcgccgtttgatactagccccatgtgtgggtataaataatgttttccagttggcatccttgagttgtgctgcttgaatagggccactttacgtggctgaagaagaatgtctctgcagtagttctccctgagcagtaactgcttggtacctttcacccacagcacccattgctgcccatccccatcccatgtctagtgtgccctcacattccactgctggtcagcagaaccatcttatcagaaagtgtcaccaagcccttttttggtgtgcccgctgaatgagcactccaggctgtggagttcgggacatgccttggtttgtggggaccatgctgcctgcctgtcgagaccaagcatcgatactgtgtgtctacctgatgaaagtgtccagtatgtgtctgcatgacttggggacactaagaaaaccaaagggattagcaacaaagagagcttgtcacctttgtgcggaagccagctggcatctcacagggacaacctacaacctgagctgctgcgtcctcactaaatctgggcccctagggaccccgttttactcctgctctcctggagcttattacgggcctggctaccaaagggaaagaggggaaaatagaccaggagccttatgctagaaccatttattttgtttcacgtgatgcagacagagataaaactgcaaatttaatgaaactttaacaatcagtacaatgtttctccttaagaactttgtaaatagcatttatctttcaagagttctttctctctttttgtgattattttataaacttaaaggaaaaagagaaaaagtcagtggttccagcatttgctttagtctgtgacttaaatggattataactcttgaccgctgacatttaccaagataaatcagtggtcatagatgtggagcttgatgtctcttcggctctgggaccaatccccttggacaaaagttttcctgtgttcttagtattctgaactggctacagcaactttaaggaaaataaaggttacaaaaaaagttctgacaatttgtttgcttttacattttcaaatttgtgaaatgtagagataattttgttttcaaatctttgtaattccctgaagcaaatactttcaagccagttgcaaaatgctgctttagaaataattcatataaacatgcttctctatttaatcacaaggggagatgtggagaatggatgttttattttttcagtagtttttgctctataaaaatattaaattgctattatgattactaaagatacctttgcgtagtactttataatttccatgtacttttataaacactattacatataatctttgaatgagttctgcaggaagatattattgtcctggttttgtaggtgaagaaacaataaatgcacacattcataacgtgcgacgtagtgccagctttgtattgccagaaaatcattttaagaaatagatttggtatgtaaaatggctagaaaacacaacacaaatttggaacgaagaagctgttttgattccacatgatctctataaaatatgaccaaaaaaaccgggaaaataaaatcatctgatcatgtgcaagtccttttttagtacacaattaggtgaatcttgtttttatgattgcttagttttcatgtttataaaataccataatatgccccataattatagcataataataaaataggaaaataacatcttccttttaatttttaagacaaattataatcacaatattatagcagaagaatgtttttcaattaaaaagtggtttggttaaaatatgattttttttcttctaaaaatcccaaaatggccaaaatatatttaaaaatatatttgttatatatatttttatttaaaaataattttttctcccacttgttaaagattaagtggcataagtatttgttttggggcaattcactgccgacattcagaaacagaactgtattattgggcacaggaaaatctgattagtgtttctaagaattagtatagcacagcaagacagggaagcagtccaaagtgctaaaggttaaaagcaatttataaaaactaggaaaagaccttacttgcttaaaaaaaaaatttcttaataattaaaattgtctaagtgatattcttgaatattttttgtaatagtttcatattattttcataaaaatactttggttgaggcagcagcagaggaggaagaattaatataaagaaaacaaattttcctattttgcaagatccaaaatcttatgaatatagtttttagtgaaaaaaattattaaacttttacacagtaaccctaagaaaagtctccacatatggtcccaaaggttaaaaaaaaaaacccaaaactcctctggggaaataatcatttcatgaaaagcagtctatttggaatttcactggagacactctgagaatcgaatcgagcttaatttctgtctttgtgataatcaaatatacattttgcattctagaagtttagaggaggtattatatgtccatggttttctttaaacaactctaacgtcaaaatggtcaaactgttggactgattcatgttagataaaacagatgggattctcagatcgtgcaccgttcagccgtttgatggaattcgcgccaccctgaccagcgagcccagatggcgcttaaatctgtcactctttaacgaccctactgttttttaaaaatatttttatatttgagctcattcagttaatctgagagattaatcttttccaagatatgtctggggagggctttactgagggtttcacttggaggagctcagggagagtaagaagaatgatgaggcctcttggacacaggactacttgctagaaggaacctggggaagaagggctggtggtccttgggctttggaatatttttgaggcaacaaggcccagaagtgcacgtgaagagtggtagtgacgggggttaagggaagaggggatggatggggagggcgtggtgcagggaggtggaggtgaacactgacatcgctgagacagtacagcccctgccaagaagcttagatctcagtaaggggccaagtgctgactgtgaccacacctgagtggctttaggcagcctgaccttcactgcatggggatgactcggtgggtgtgccccaggagcagagcccaagatgggctccaatgtgataagcctctgggatggctctggaaagaacctgttctgcaccacaactctcacaaatctcatggggtttttttccctgtaggttttttcccccctttcttaaattgttatttcgagccagtcagcctactgaaatgcttcagtcatttggggtgtaagatgttggccagctcccgaatctctaaccttggatacatttgcagagtggcttggaattgctttctattcctgctggggtaagaaagggaaaaatgaatgatttttcattatgcacacatggtattttttcccgcatttgaatcagatgtagcaggtgtcaaaatatggtacagaatttacagtattaatgtgaaaatttctactgtcccaaaaagccaccagagatggacaaacccacctatgttaacaaaagtaaaaatgccctgctgtctttaaagatgttcctggtggtatttgggctgctctgtgctagtttttctggggatcacgtgatgctgcctatacttgggggtcttgtggaaagcagtggatgcctctcaccctgcatagaagacgggtccaaatgtcttgtgcccacctgagtgtctacacactgaagacacgttagaggtctgctttagagaggttttcctcctaaattaaggatctatgactttcacatagacccaaaagtgagcagagatgcaagttgtgttgagaggttcttttggaagatgtggggctttgggggtcttggggactgggggactgtcagaagtcactgctctagtagaatgtggtgggaacttataacaacagattctccacagaaatgccacacgtaaccatcccttgaggatggagccacgtatgctgtaaacagagtggaagaacatcaagctcgtaacttgtcattttcatcataaatctgctgtaagcttgcaacagccacggtttccccctccccacccacatacacatagggacattatggaaaggattgcagtatagtcctacttaaagaatcttgctttttttttttttttttttttttagaaaataaacaattgctagaagagtggagagaccacttgcatctaactctgtggcaggtttaggattctgtgtaatcagtaagacagagagggaatgtgtcaactggcctcaatttcctagtagttttgggtgtttacagagtacaattgaacattttaagggaagcaacttgtggtgcctgcattgaaaatcattttgatgaagttatggaatacatttgatattatctaaaaaacaaatctcctacttttttgactcagatatttctagtagtcaaaataaacattcgctcttaaattttactagtcaactcatttcacattcacctgattccctctaaaaacaaaaatctttctactattccaattggcaaatggtctgttttggaacaaaaggatagatgcatttgaagaattctctggtcacctgagaaatgaaggtttgcccatcattttttattaatgcttgccaagtaattaggtatgaaaagatgaggagcaaaaataaatcttcatcttcaatagaacattagaggctgggcatggtggctcacacctgtaattccagcactttaggaggccgaggtgggaggattgattgaggtcagaagttcgagaacagcctgggcaacatggtgaaaccctgtctctacataaaatacaacaaatagccatacatggtggcacatgcctgtagtcccagctacgtgggaggctggggtgggaggatcgtttgagcccaggaggcagaggttgcagtgatccaagatcatgccactgcactccagcctgggcgacagagtgagcccttgtcttaaaaaaaaaaaatctttaatagaacactggcggccgggcatggtagctcacgcctgtaatcccagcactgggaggccaaggcaggtggatcacctgaggccaggagttcgagaccagcctgaccaacatggtgaaaccccatctctattaaaaatacgaaaattagctgggtgagatggcagttgcctgtgaatcccagctactcgggaggctgaggcaggagaatcacttgaacctgggaggcggaggttgcagtgagctgagattatgccactgcactccagcctgggagacagagcgaaactccatctcaaaaaaaaaaaaaagaaaaaaagaatattggctatttgagcaagatgaatgtattttggtagatagaagaaaaatgagaactatcgctcatcactgctgatgtctaaatcccctccctgggcatgaggatggtacaatgacacagcaaccccagcctgccgggcttctgggatgccaagctgggggtgtcctggccaggtccaaggtgctggaagccaatccagaaaataggatgaagggataaaatcacactccaaggccgtgatatgattgaatcaaggtgttaatctaggtgaagagtgcagaagccagattcactaggggctccagggcaggacaagctggttcagcggggagaaggcaggaggcagatgcccaagaagtgtgggcagatctaggggtgactttataggccctcagcttttttttttttttgagatggagttttgctctgtcaccaggctggagtgcagtggcgcgatctcggctcactgcaacctctgcctcccaggttcaagcgattctcctgcctcagcttcccaagtagctggaactacaggcatgtgccaccatgcccagctaatttttttgtatttttagtatagaagggattttaccacgttgaccaggatgctctcgagctctcaacctcatgatctgcccgcctcagcctcctaaagtgctgggattacaggtgtgagctgccgcgcccggccaggtccttagctttgaatggggagtgaggcattaggggcatggagacacgtgaagaacatgtagcttgtcctttcttccttccagagctttctctagccatttgcaaaaattccacaagcacattatgcagtcatttttctaggaactggagagaggggagaggtggatgggaggggagggtgtcataagccttgaaaaagttagatattccaaagaaccttagcttttcccaaataggaaatggagagttgggtggtagtttcaaatcattatttcattttctttacctctgaaaagatttcttagtttactgagagcctaccttcaattgcatggatgttgtacattttctttttcatttcccatgaagatccctatttttagcttttaagagctgttactcacaactgagatacaaacagtgttctgcaccccacacagcatatatctcatgattagtgacagggttcctagaactgcaagacaagtttgggcttactcaatctgttaagtttccttataggcatattttttcattctattgttttagcaaggggcctattagaaatttccatgtgtataaatgacactttaaagagctgggtgcaggctgggcgccatggcttacgcctgtaatcccagcattttggaaggccgaggcaggcagatcatttgaagtcaggtgttcgagaccagcctggccaacatagtgaaaccccgtctctattaaaaaaaaaaaaatgaaaattagccaggcatggtggcatgcacctgtagtcccagctactcaagaggctgaggtatgagaattgcttgaacctgggaggcggaggttgcagtgagctaagatcgtgccactgcactccagcctgggtgacagagcaaaactccatcttaaaaaaaaaagagctaggtgcagtggtgcatgcctatagtcccagctacttgggagactgaggtgggaggatcacttgagcccaggagtttgaggctatagtgagctatgattgcgtctgtgaatagccactgcggtccagcctgagcaaagtagcgagaccctgtctctaaaaaagtaaaaattaaatttaagaagttcttcaccatccaagttatgttacgtggaatttcccgtggcagtttcctgaaacataacttgtttatgtttcctgaaacaaaacttacctgcagtttctagacacgtgctctaaaaacaggcatctactggcctgttttaggatttagaaatctctgctctgcccttctttcaactatccaaatgaaaagaatgttttaacatttcatatttgtgaaagtttcctcaattactgacttttttcagttttacaatttgtttttggccaaaacaacagcaacaacaaaaatacgatttaactgcaaaattgaccccctgatcttagctacaccttccgtggtccttttctaccattcagcttgaccctccacccatgggaggtctctgctcattgggaatactgggccatgaaacatctcaatattttccatggtctttactttatgcttgctcctcttctgttcttcatacagcaagccagagaatcagatcatgtcacttccctgcatatctttcaaaacatcccattgaacttagaatacaatccctcctccttactgtggccaccaaagccctgcattgctggctcctgctgacctctccagcaacatcttatgccactctctcccttgtccgctgcccttatgacacaccggtctcctttcagtgcctgcggtatacagcgagctagttcctgcctcagggttgttgcactagctggttctgctgccagattctttctgtagctggctccttgtcctcttgaggccctaaagccttccctaccatcctattttaggactcttatcctcaaccccctgccatgattctctctcacagcatcctgtttctttccttcatggcatttatcacagtctgtcaatttttgttttttgttttctcgtataatgtttgtcttccctactgcaggccaaagagtttgagctgagcagggagttgctactgaaagtgtttgatcaggggagggtatgattgcactttaaggagattgatctatagccatggacaaaatagatttaagtgcttggtgaaggcaagggagagactgaaacagaaaagctaagaatagaaaactactgtaggctgggcacgatggctcacacctgtaaccccagcactttgggaggccgaggtgggcagatcacttgaggtcaggagtttgagaccggcctggccaaaatggtgaaacctcacctctactaaaaatacaaaaattagccaggtgtgatggtgcgtgcctgtaatcccagctactcgggagactgaggcaggagaatcacttgaacctaagaggcagaggttgcagtgagccaagatcacgccactgtactccagcttgggtgacacagcaagactctttctcaaaaaaaaaaaaaaaataataaaagctactgcaaaagtcctcctagtaggtgacagggactcaaactggtaggtgagaagggatgtgtgagagactgcccttgtgcctggactcacgtccctgacttgtgcacctccctcccaagcacacagtccccttctcacatcctcgccctcactccacccttcaccgtctccttttgggtgtcacctctgaggcaggcactacaggccttctgggtgattcttgagtgatgggtatgtctcacatctttttgttgatgatacagttcctttatacagagctgtattgttattagctgtcgtccctcttgttagagcccttctcaaggaagaataaatacactgtaggtgactaggtgactcctggaatcttttcttcgggaatttctttttttttttcttttttttttttttgagacagagtcccactctgttacccaggctggagtgccagagtgcagtgttgcagtcatagctcactgcgaccacaaactcctgggctcaagtgatcctcccacttcagcctccagagtagctgagacaacaggcatgcactactgtgcctagctgcctatcagtttttctttactgggtaagtataaatatctaaacatccacaagacatggaattgagagtctcttttctctgtcacctagtgtatttcaggtctataataaatattatacagggctgggtgtggtggctcacaccgataattccagcactttgggaggcttcagcaagtggatcgcttgagcccaagagtttgagaccagcctgggcaacatggtgaaaccccatctctaccaaaaaaaaaaaaaagttagccaggcgtggtggtgtgtgcctatagtcccagcttcttgggaggtgtgaggatcacttgagcccaggaggttgaggctgtagtgagctgtgattgtaccaccacactccagcctgggcaacagagcaagaccctgtctcaaaaaatatatattaaacagcaacaataacattttacctcatttttctccactgttcattttgtttgaaaatctgtgtggcaaaactctatgcccttaacccttaaagttgccattagccagatgatggcaggggaagggcgcatgggatcttcagcagtccttcatccatgcgcccaatgggtattgaggagccaccatgttcagggcactggggagatccatccatgaacagaaccaaaatctgcccccctagagcttacaattcagcaggctgatggtaacaacagagataaataagttggtcatggagaattttagaaagtgtccagtgtcatggtgcaacagaaaaggtgcaacaggggccaggcatggtagcttagcctgtaatcccagcactttgagaggctgaggtaggcagatcacctgaggtcaggagttcaagaccagcctggccaacatggtgaaaccctgtttctattaaaaatacaaaaattagccgggcatggtggcgcacacctgtaatcccagctactcagaaggctgaggcaggagaatcacttgaacccgggaggcagaggttgcagtaaggtgagatagcaccactgcactctagcctgggcgacagagcgagactccgtctcaaaaaaaaaaaaagaaatggtgcgacaggggcaaaggaaatgaggggaggcaggatgctattttaaatagggggtaaggataagccccattgagaaggtaatatctgagcaaaagtttgaaggagaggaaggacttagccttgaatacttttgaggaagaatggtctaggtagagcagccctgtgtgtccgtggttagcagggagggctgtgggctggtgtgaagtgagaggggtccacagcaatggaggtgagaccagagggggaaccagaggccagatcgctggaaggatgttggctttactccaggtggaatgaggagccattgcagagtttttaaacagatccctccagaagttatgttgagaataccatgtaggagacgagggttgaagtggggagacccgtcaggagatagttgctgtgagacaggtgagagctgctggtgtctcaaactgagtgagatgtacctgggatatgtttcgaagcagaatcaatgagatttcctggtgggttgagtgtttctcagttggaaataaaagaggagtcaaggatgactgtcaaggtttttggtttgtgtgactggagggaaagagtggctttcaaaatgggtttggcaataaatggagcacgcttttgttggggtaggggtggaggtcaagagttcagctttggacatgttgaatttaagatagctactagaattcgtttttttttagctactagaattctttttttttttttttttttttttttttgagatggagtcttgctctgtcacccaggctggagtgcaatggtgtggtcttggctcaccgcaacctccgcctcgcaggttcaagcgattctcctgccttagtctcctgagtagctgggattacaggcacgtgccaccatgcctggctaatttttgtatttttaataaagacaggggttcaccatgttggccaggctggtctcgaactcctgacctcgtgatctgcccatctcggcctcccaaagtgctgggattacaggcgtgagccaccatgcccagctgatagctactagaattctaagtggaggtatgaagtaggcagttttggggagagaggctgggtctggagatgtacgtgtgggagctgttagcagagaaatggtatttaaagtctgggtggggtgacttaggaatggacacagagctgactgagcagtcacaccccgtttccccacgaagacctcagcccaaggcaaccactaatctattttctgtcttaatgttggacactccaacattaagggatgcgtaagaagaagtggagggggaaccagcaaaggagatggagaagtcatgagcagtaagataggatgattaccaaggagtatatgtcctgggaaccaagtgaaaacagtacagcaagttgggagggggtgattgcaccagatgttgctgccactgggtcagataattaggaaaccaagaatcgactattgaaagctggatgcaatggtgcttgtctataattccagccactcaggagactgagatgcaaggatggcatgagcccaggagttcgaggctgcagagaacaatgatcgctcctgtgaatagctgctgcattccagtctgggcaacatagccagaccagaccctgtctcttaaaaaaacaaaaattgggctattggatttagccacgtgggggtcatgggtgaccttgacaagagcagatttggtagaagcatggaatggatttttcctaatattcctcctcttcaggggcagacaatatttaaatgaaaccgtatttggagcactcatcaggctttaatattgatgctgcatcttctactgtcacatacataaaggggaccaggaccactgcattacagatgtgactatttctaccttatatatgtatgccctatatgtgtatatactttatgtgtctatatcagctttattgagatataatttacatctcatacagttcacctatttaaagtatacagttcaatgaatttaatggtttttagtctattcagtgttatgcaaccatcaccatgattaattttatttctatcactgtttcttcagccccaaaagaaaccctgttcccattagcagtcactcctccttttcccccaaaaccctcagtcctaggcaaccactagtctactttctgtctttctatatttgccgattctggactcttcatatacatggaatcatacgatacgtggtcttttgtgactggcttctttcacttagtataatgttttcaagcttcatccaagctgtagcatgtggcagtacttcattcctttttagggccaaataatattccactgtatgtactaatatataccacattttatttattcattgattagttgttggaaatttaggttgtttctactttttagctattatgaataatgctgctatgaacatttctgtacacattgttgtatgggtatatttcttctggggttatacttaggaatggaattagaatgcagtagcatgatctcagctcactgcaacctccacctcccgggttcaagttgttcttgtgcctcagccccccaagtagctgggatcacaggcactgtgcctccacgcctggctaattttttgtatttttagtagagatagagtttcattatgttggccatgctggtctcgaactcctaccctcaggtgatctgcccgcctcggcctcccatggtgctgggattacaggcgtgagccaccacccctggccacagactggcttccttccttccctccgtccgtccttccttccttccttccttccttccttccttccttccttccttccttcctttcctccctttctttttctttttctatttctctttctctctctctttcttccctcctctcccctcccctcctgtcctcttctctctttctgacagagtttcactcttgtcacccaggctggagtgcaatggcgcaatctcggctcactgcagcctccacctcatttgttctcatgtcttagccactcgagtagctgggattacaggcacctgccaccaggcctggctaattgtttttttagtagagacaggatttcgccatgttggccaggctggtctcaaactcctgacctcaagtcacctcagcctcccaaagtgctgggattacaggcatgagccaccacacccagccttcttcattctttttttttttgaggtggagttttgctcttgttgcccaggctggagtgcaatggcacaatctcgacttactgcaacctgcacctcccaggttcaagcgattctcctgcctcagcctcccgagtagctggcattacaggcatgccccaccactgggtgaaaaatgcccagctaattttgtatttttagtagagatggggtttctccatgttggtcaggctggtctcgaactctcgacctcaggtgatctgcccacctcagcctcccagagtgctgggattacaggcatgagccactgcgctcggcccatcattcttaataatattcccaaatggtgtatagataaatactgccacaatttcaggactagaggttaaaaaaaaaaaaaggacaaagttggacagtagagctgagagcacaaattgtcccctttttttcccaggtccttaggttcgtagacctgtgtcagccataattactgctgaatgtgactcctgtgtatacggtcatttttattttttctgttcctggaggtaatgcaataagtcacctcaaaaagggcagagaatgagggagagaatctacctgcattggcgtattgaaaagatcagattatttcagaatccagatcattgtttacttttagctgcataaaaatatccaagtagattttcttataacctctccaagataaagatgccagaaacggcagccaaatacattgactttgagagaggaaaaaaaaaaagcttgtaattgccgatcactccttagatttacttctggggagcatcaattaaaaatctcaaaacacgtggctttttcagtaaaattatattaatatggaggaagagtttttattaaatatgagtgcacgtgtgtctgtgtctgtgtgtgttttaaacgtttccataatgagttcccaagtgcttttttggcagtagttattaaagcttgtgtgtttgcgatttatctggcaaaatgcctttagtgaagaaaggatatagtgttctcttggttctttgcccaaagtaattttggagaaatctgtgactgtatttagttcatgtcattcattggagacaagtcattgtaattacatttgatcacaatcagtttacagttgttttatcatgttttcatgctgaatatctactcagacatcatagcaaaatttaatggctactgttttatttgtacataaaaagatttatagcccttttttgcagtacacatcgggtttcaatcatcactgctacagagtgagaggaaagctatggataaagaactatcagaaatccttgactacataaaattttatttcaggtcaccttgccataaaagatattgaatgtattttgtggcttttcctcctgacatgctaaccgttgtagaagagttgcaatatttggaggaaaccgtatgaaatgtggaacttaattcacttaagatggtttacatttgcgcgtgttttccactggaaatagccatgccagccttatgaatggcccctgggtaatgcagagtaaaaggcaatggcattaccgatattgttgagttttaaaaggaagttgtcttcttaaccatacggctgaacattttgtcattgttgtttcagaaggtctgctctaacatctgcactgcggcagagttgtgttacagggtgttatttacagctgccaaatgctggaggctctcatgtatcagacagtctctgatttgctaattgtggaagccttgattcaccagtgaatttgggtaaattcactagttatctcctaagtgtcacttctcaccatgccttatttttcccaaaaggttgattccaagctctgctgaaatctgctcttggtctatatgtttgagtctacattgttgaagaagctccctttagaaaagtgtaattaatgggaaactttgacatccagctgagaaaattagtttgcatcaaaaaaggcaagatagaggattaaagaaattttagtcctaatctaattaacaccaattaaaagatgcagatgaatttacaccaacaaattgttaattatgcaccaatttgccttttttctgcaaccaaactgaaatcaggaaagtattattatcttttttgtttgaggagacttacattgtgggtttgttacaatcatcttttatataattaaaaggtaggcagaaagagcgtgaaatatttcagtctcctgacattttaatttaggttaactctttaaaaatacaaagtacagaaaaaaaaaattccagaaagtacaggataattctattagcatttattcactgactagatatttattgaggacctagtatgtgctggacacttaggtaaccattgtttctctcactcaaaatattttaacttgtttgtatttctaatatattgctcattagaaaaattgtatacgccaggcgtggaggctcatgtctgtaatcccagcattttgggaggccgaggcgggcagatcacgaggtcaggagattgagatcatcctggctaacacggtgaaaccctgtctctactaaaaatacaaaaaattagccgggtgtggtggcgggcgcctgtggtcccagctacttgggaggctgaggcaggagaatggcgtgaacccgggaggtggaggttgcagtaagccaagattgcgccacagcactccagcctgggcgacagagcgagactccgactcaaaaaaaaaaaaaaagaaaagaaaaagaaaaatagtataagctaattgtaccaaaattgtataagctaattaaattctgccctggatacatgtcagaaaaggagaatcgaaattttgggcctcaagaaatgctcttaatgtcccagaactcctctttaatgtgaccttttagggtattcagcgtccatcttcctcacccggggaatctgtgtttgtttcccagtgttactcagatctccactgtgctgggactttctttttccttgtgaatcactcttacagctcctcagatggtgatctgagtaattatgtagagggtggtgaagcacagaccttttagatctgcaaatgacacatctgtccaaatgtcatgtaatgagtaaccacaatccactttatataagccatatttcttctctttccaaaatgggaaggagagggtggggggggaaatgtctggtagaaatgggaagaaaagcatttctatggattcctctagccattaattacatagaaaatgccacagctgccctcagatttccaggtgcacgttattaaacgtcattcaaaggaaatgtttggccaactagatcctgatgtgagaaacagcatcctaaagagctatgtatgttactgtctaatgcatgtacttaggcattaaataatattaaatgaccatattaccttcttggggcaatagttaatataaacatttaggatgctcagtttgtacttttcagtatttgtgctggaaacttttgcattcacaactttgaaaactggctcgtgttttcatgggaagtgtcagtttaaagttggcctactaattaatgggggaatttcaatatggcagtgcctatgacagcaaatgaaaagcattctttataaacatcgtcttcctccacacattcacaggttagtatctgacacccatttttaatttctagagcaccatttgtacttctctgtggttttgcctgcaagtcttcgatgatgcagtccacccttccataaaaacgtactccaattttcctagattctactttcattgttttgtgaatcaagttagaaggtacataacttagcctgatgagatggcattcataaggttaggatagcagagttgcctaactaatcttcctgttgcaatgaaataaaagaatgatatctaagttgaccaaccttgtaaaaggtaattttacaagaggcctccaaaaataacggactaggactggccagagaagaaaataaacccctcatcctcaatccagaacccagagtttgtcatcactagtcgaaaagcttgtttgttttatacctaagtgagaccttgagttatccaatgtgcttccatcacagaatggcccaccagggtagaaggattctgagtgtattccctgatgctgttgccatgtgcctatggaatacctatgctccatatttagccctctttctgtgtagtagcagagacgtggatggctgctgaaactaagggcccagtctttggccttaggacagaccactgggtttctcccactgcctaaaaccttagtagcattagcatcagacatggacccaataaacaaactacctagttgataagcgccgcatttttcatgatgttttactgtggcctatccacacactctttcctattccatgaaaggaagaaaaagataatttgagttgtcctataaattaaaatttttcctttgtgattattttggaccagcgccataacattcagaagattatgagtggagtctttagtctgtgaacaaagtcctaagaaggaagtagtgctgtaacttacttcatctaaagaagcatcatcgctgaatgtaaagagtgattctggattggatcttaagccggaaaaataaatggagataaagtacgttattgggataatttgtgatatttaaataaggcctgtagaatagatactagtatcgtacccatgttacattttctgatttggataattgcaataaagttgtgtaggagagtgtccttggtttggggaaccatttaagagtataggggcacaatgaatataacttacagatggttcacggaaaaaatacaggtgcatactatataaaaataaatttatatctgcatatattatgcatatctacctatctatatctgtatttatacatatggagagagagagaccaagagagacagagagagcagtaatgataaagaaatgtggcagaatgttagtgctaacagttggtaagactgggtaaggagaattcaggaattatttagctatccttgcatttttatttttattttttttgagacagagtctcccactgtcacccaggctagagttcagtggcacggtctcggctcattgcaacctccaccttccgggttcaagcgattctcctgcctcagcctcctgagtagctggggttacaggcatgtgccacgacgcctggttactttttgtatttttagcagagacggggtttcaccagttggccaggctggtctcaaattcctgacctcaagtgatccacctgtctcggccccccacagtgccaggattacaggtgtgagccaccactccctgcctccttgcatcttttctgttagtttcagattacagtcatgtgtcacttaacaatgagaatacgtcttgagaaatgcatccttaggcaatttcatcgttgtgctaccatcacagaatgtatttccacaaacctagatgttacaacctaccgcacacctaggctgtgtggtatggcttattgcccctctgacataaacctacacaacatgtagctactgaatactgtaggcaattgtaacacagtggtaaggatttcttttcttttctttttttttttggagacagagtctcgctctgtcgcccaggctggaatgcagtggcgcagtctcggctcactgcgtcctccacctcctgggttcaagtgattctcctgcctcagcctcctgagtagctgggactacatgcgcctgccaccatgcctgactaatgtttgtatttttagtagagatggggttccaacatattggccaggctggtttcgaactccagaccttgtggtctgcccaccttggcctcccaaagtgctgggataacaggagtgagccaccgcgcccagccaggggtaaggatttctatatctaaacatatatgaacagaaaaagggtacagtaaaaatactgcataaaagatttaaaatggaacactcacagaaggctcttaccatgaatggagcttgcaggacctcatgttgttctgggtgagtcagtgagtgagcagtgagtgaatatgaaggcctaggacattactgtcactactgtagactttgtaaacactatatacttagactatactacatttattaaaaaaaacaaaaaacttttcttcagtagtaaattaaccttagcttactataacattttttttttcttttgaaacggagtctcattctgtcacccaggctggagtacagtggcgtgatcttggctcactgcaatctcagcctcccgagttcaagtgattcttctgtctcagcctcctgagtagctggcactacaggcacctgtcaccacgcccggctaatttttgtattttcagtagagacgggggtttcgccatgttggccaggctggtctcgaactcctgacctcaggtgattcacccacctcgccctcccaaagtgctgggattacaggtgtgagtcaccacacctggcccaactttttactttataaactttatatatatatatatgttttgttttgttttgtttgtttttgagatggagtcttgctctgtcacccaggctggagtgcagtggcacaatctcagctcactgcaacctctgcctcccacgttcaagcaattctcctgcctcagcctcccaagtggctgggcttgcaggtgcccccccctacaccaggctaatttttgtgtttttagtagagacatggtttcaccattttggccaggctggtctcgaactcctgaccttgtgatccgctcacctcagcctcccaaagtgctaggattacaggtttgagccatcacgcctagcctgtaaactttgtttatatttttaactttatgactcttttatagtaacagtaagtttaaaacacacattgtacaaaaatatttcctttatctcttattctatatgcttttttatatttttaatttttattttttatactttttgaactttttgttaaaagcaaaaacacaaacacatacattagcctaggcctacacagggtcaggatcatcaatattactgtcttccacctctacagcttgtcccagtggaaggtctttaggggcaataacacgcacagagctgttgtctcctgtgataacaatgccttcttctggaatgcctcctcaaggacccacatgagtctattttacagttaactttttttttttttaataaggaggcgtatagtctaaaatgaagataaaatgtaaagcataatataaaaccagtaacatttattattatcaagtattatgtactgtgcatggttgtattgctatatatatataaaattttttttttttttgagacagagtctcactctgtcacccaggctggagagcagtggcacaatctcggctcactgcaagctccacctcccaggttcatgccattctcctgcctcagcctcctgagtagctgggattacaggcgcatgccaccatgcctggctaattttttttttttttttttgtatttttaatagagacgacgtttcaccatgttgaccaggctggtcttgaactcctgaccttatgatctgcccacctcggcctcccaaagtgctatgattacagatgtgagccaccgggcctggcatgtttgattttttttttttttttttttgagacagattctctttctgttgcctaggctggagggcagtggcgcgatctgcaacctctgtctctcaggtttgagcaattctcgtgcctcagcctcccaaatagctgggattacaggtgcgtgccaccacacccagtttatttttgtatttttagccaccgggcccggcccagtataatcttatgggagcactgtggtatatttggtctgttgttgacctgaaagttatgtggcgcatgactgtatctaaaaacaaacaaacaaaaaatttaaatagaaaagctggattccgaccacatgaatgaaccttcttatgattctggaaggaaggcaggttctactaagacagggttcttaggctactaccactacctcacccataaaggatcagccttcttaacccagccagtcacaagggattctgaggatgaatgttcaccagggcagattggttatgttcaacagcttcatgtatttctgcaaaatctaccagtccgatgatgcagtgaacataatgatcccctgtgaaataataacaagataaaatgttcccaggcccatttgtttcccactgctaccaccccataagactgaaccatgggttggagtgaacacttgaaccaaaggttactgtattgtatgttcctgttcacacaggacttcacaaaaaccttcttttataaagaaaacaaccagccaataaaacagcattagagtacattatatatgtgaccaattgtttgataaaatctgatgtaagccttcaggcgtaattggagttcttagcaaaatactttggtttttaatatttctatgaccctctaagggggacttagcaattactcttaaattttcaaagtggtgcatggagttttagctgtgtgacttccattaaagtccataggagtcttgttgctaaaacatcacacaactcacgaaaatgtgccccttcttgtgaaattgttagaagtaatgggtatggaagtatagcacagcatttctggtacatttacaagctttctgtacttgtttcaaactttatacctttatgaaaactcaatagttctacaaaaattgaaggggggaaaaagcctattatgtgtattccagaagtgaagggtagaaaaaatacagtagaactaataaaaaattaaaataattcttcaagaaaagccaatgtttcaacatatttataatctttatttcaaaattaatatatcctctcctgggtttttaaagtaagccttaaaatcgaacttaaaaaaatgaacttgactgacaaagtttcactataaccacatacaatgattttgggtttcagcaacctcctctactgaaaccgatataatttaagcatcatcggagcaaaacttcactcctttagatggttggtggtgtgaggggtttgttcccagtggataagaggatggccttaaggtttgctgagtccttctctctcaagaacctcttagaggccgggcacggtggctcaagcctgtaatcccagcactttgggaggccaaggtgggtggatcacttgaggtcaggagttcgagaccagcctggccaacatggtgaaaccccgcctctactaaaaatacaaaaattagctgggtttggtggtgtgtgcctgtaatctcagctactcgggtggctgaggaacgagaatcgcttgaacccgggaggtggaggttgcagtgagcggagattgcgccattgcactccagcctgggcgacagaacaagaccctgtttcaaaaaaaagaaaaagaatctcatagacatttttctcctgcgtccctgtgataagagtgctgtgattcctgctatacagtcaaacagattcagagcccacctttgactccaggaccaaatttccccctttattctcttttgtgctatgctggagaagacagtgtggcagttcccgggaatttgtgtggagctgtttcagggacactctgagctaagaaaagggtgagagccctgggaggagaccttctttcaatccaggctacatgctctgagtttttccagggcatatatagctgctccatttggactatgctcctagactgacatgggcctgactcgcaggagccggcagctcctagtgctgagctcaccggctcggcccagcaccagcaccacctcccctctgagcatctggtggccttgctgataacacagtgacacagccatttccttctatagcagaaacatctttggagttctgtttccacagtcctttgagagacactctcgaggccaggagctggcctcagacataaaagtatttgtttcaacagagagagagagagagagagagagactcagtgactgctttttgagtgaattgttgttggctcagtttcagtaatgcaatgttttgctttagattaatttactaagcagtactaaagtatcatttatatacattattgaatcttgggatgattctgtaagcattactttctcctgaaatctccacttctgtctggatagtggattttaggataggtttttaaaatggaaaacttgacgcagattcaaattttcaacacagcattgaacgaatagcatcagttggggacgagctatgccaccaatttaaagtgtctcagccggggtcagaattaggaactgtctaaacagggaatttcagaagggcaggggaggatatcaaggcacaaatgggaggaaataagccattgttcctttagaaagcttagtaacctcgataatgagaggctatgaaatagttctttttataactgtaacttcttaacttcccagccctaatagctccaagggtcacttgcagagagctccggggctacacctgccttgcatagattagggcccgctgcagctgtcttcatttgcaagactaaggtgtagctccaagaggctgtaggtctcagcatggagcactcctcctcaatctcaataggctggtgttgcggattaagatggccattgcaagccaggctcagaaattgcaagatgaggcaggtaacgatttcctgggttttatgtatcaggccttatgaggtatgaagcgggaaaccttttatatgcctgccttgaattagccataccttttacaatcagctctgttgaagagcagctgcctggactatctagcatacccatgggccaggcatgcctttggcacacacacaggtttgtaaagagcttgtgaatctataggatgatctcttggtgaggacagaagggacccatagctagtcagcatcggactgagggctggatccactttttcctgtaatgtgcgtttgtttcacagaaaatacaattaggataattcttgtgtgttctctacaggaaggaagtagtatactgcttgtgaatggtaggctaaatgagggaaccattaaagggtttttaatagacttttgaaccaaaagacataagggactatacttacattgccttaactgagaaatgttttgcagtgtgagaagacttaatcaaatcttcattacatacctggtcagggaccaggctgaatgtttctttaagcaattggataaaatgcacattgaagacttgttagttatgtgagaatatgtctgacatgcttatcatctctcctgcgggtgcctgagtatcagatacttggtttactgtgttgggttgaatgcttctgttctaatttctaatgaactttaccaccagactacttgatcatgactaagcccaggaacaatgcaaatggaattgccccctgatggggaggaatgggcccagatggcccttaaaaggtgataattaggaaatatagcatatctgagtagctagaaagagagaaacttgttaaagacagtcaatctgtttgaagcaacggtctttcccttaattatatgcattttcatttagagttgctttaaagtaaaatttttcccaggaaaaatttttattagtagtgaaaacctagaaaccacacacattttttgctactctgtttcagattattgaaaattccttccttcatacatttttttttggtttccagatctgtgtaacagactcgctgtgtgtgttttaggggccgttttaggttattttagctcttatgctaaaacagtgggggagcgattaaaagtgagaaaaatattagtatatatttgtaaactgagcttttaaaattaaaatagttgcaggatattacagtctgtgatttcatatactttgtaagattgccttaaatgtattgccttcttggcagcataatgccagatttttctccaatatgtcattaaaataattttacatataacaagttgaactttttaaagacttatattttaatctgaattagcatatttactaattatattacttatttggcttttctttagtccgattctttttttttttttagtgtacaaacttggcattactctttaagaataacaagtgaactggaaatgagagggtggtgacatgaagagagagagaagaaatacattccttatatctcttccagctcctgcatggaatggaggatctgacagtggccgttcctgggtattaaagccagtgcaaaagatagagcgtccaaaaggcaacttcttccttatttgtgaagtcagaaagtaaaatttacattgaagtgctaagctacattattctgaatattttggcagtcatatttgggcagatgagttgctttcctgaaattactcagcaccgtcattcatcctgacaaaagctagtggtacagatgcacctttgggactgaggccaaggtgaaacctgcgttttccaggtctgcccactcagttttggaaggactctcaataaaaccggcctcacaccccaagcatcacccctcctgtccttagtaagtacactctggctggaatctagggtcccagcatctagcccttgggacttcacataaattcatcaagtatcttcctccactcaaaaatctcttacagaatctttgacattttaagcttcattactgcaaagtggatatagttcattctcagcttcaggattccagaagcatacataccaggtcagaatggagaggcatcacgctttccttcagcaagcttcaggggagacaggatttagggtgggctacacatataccagttgtaggatgttttgaactatattcttgcaatcacagacaggttgtcccagagaaaataatctggctctaacttctcttgttatcagtgaaaagcaaaaattacttagtgcaggtatgcttaaaggaagaaaaaggcaagagaaaagtgagaggtaaaaattattaccattttaattccatgattctcagcaatgaaggagcatgattgaaatcccatgtgcccagtcatatctgtaaatgagagtatgatttttgaagactgtattcaattgtttcaacttgagcaattgcaagtaagacttaggactgtgtttaccagttactgttatttactattactttctaaatgtgacctgacttgaaacctttatagatgcaatttttatccatcacagaacaagctctaaagaggagagcagcttcaactttttcaagtattttttttaaaaggatttaactttgaccaacaccaaacttgcatcttgttaaggtaactaataactgactgctataacaatatttagaattttgtttaacagcaactgtcaaaaaaacaagttaaaatagcccaggagatggatggcgattaactctgcgttctttttagactgtgttattaattagctctctagactcaaataggttacatcctctgagcagtaaattgcatgccatttgcaagctctgtggatgaaatttacatgtggcctaaatgctatccacattgttttgttaagtagcattttatctctctggactggtcccttgcctcctcccccagccccagtggaaagttttattcacttttcttgcgggaagggaaagtcgcatgtagtttggtcatttggcgccatcttcttttttattgttaaatccactaaaggcagtcatgcctggcagtaccaggcgggctccttccggggttctggtcggctaagcattcagagttctttgctttttatttactagaaatgttttcagcttctgtctttgctttaagatctgattaaaaggaaccttaaaaaaggaacatagattttggtgtatgtttttcctctctacttctcttccctgtgccccccaaacccaatcaccaacttcccccatccccagcaaacacgggcttttttgtgtatttatttaaaagcattttaggaagcaccgtaataccgcacagcttggaggttaagatagaattggatgtttccctcaccatcagttgatggaatcatcagtgttccggttctatttatcttcatgatttgagaatgtttctgaacagctgcccttccgaggatgctggtatttagacagaccttcctgtcatttatctgactcacaggcacaactcttttgaaagaattaatatcaaacttacatatgaaaatctaccatttagaaatggattctttttcagtacctacttttcaattcaaccggggagatcccatctattttaaaaaatcattaatcacatacttctgacattttccctttcagtttcctcagggggaaaaaagttatttgaataacaaacaaacaaacaaaaacccctcatcgcaaatagctgtcagcctcctatgtgaacaaaagcgctctctcacactgagacctaccgtgttttgtttagttagaggcagcagggtggtagggacactatgcagaaaggcttgggttaatgagcactttctggattgagtgtctctcctgattaacccttggattacttgctttgagttgctaaccctctctcactgcccactcaagaatttcccacatggtagcctcatccatagatgcccttccctagatgcactgatggtagacagcataaaaatgtgtaagcactgtagctttccaatgaactgaaacaaaaagcttaagcattactttttatttccttgatctaaagaacatgttttgggggatattttcttaatcaatatctaagttatctagagttataaatactataaataaattagttacaaactaatttttagacacaagtcttttgttcaaaccaactcttacatagaaactctaaaaatttgggggggaaggggacagttggggatcagaatcactccccattatctctctgttggtgctccccaaaggatcttcagggaacgacgtttaaaaaccattttgtatcatgaaatgggacccgaaagacattctttctagtgactttgtgttagattgagtcatatgaaattgccactgtgtgacccattttgacctaaaaaaaaaaccaaaaaacaaaaaacaaaaaaccagcactagggtaccagagtatttttagtgtaatcactgtacgtgataagaaaatggagaaatgagaaagcttgaaacttagactataagctcctcataagctaatagcgacttcctcccttcttccgcagtcacctggcaagtcccttctatgtgctgctggttctagggatacagagataaaaggcgtagtcactgcctccaaatcatcacagtgcaaaggacaaataaatacagaaggacccatgggatgaagaaacagcccagggtggtgggaacacagagcgagagtttctaggatcttgaaagccatgttgcacggagctcccggtccctgagttttcagactgatctttctgtggactgtgcctaagtaataacagtttcagaacgtagaaactcagtgtacatccttcatagccaggatggatatgatagcctggaagtgaacagtaaatccagtgatttgttttcttcactcattctttcattttaagaaagtgcttagaatccacaagttgtgcttaatgccagcagacgcattacatatgccagccctgccccttagtcacaattactccccacactgacctcccattgcatttaaaaattgtcgctttattgagacatagttcagctctcataaagttcacatttgttttttttgtttttttttttttgtttgtttttttgagacagtcttgctcagtcacccaggctggagtgcagtggcatgatctcggctcactgcaagctccgcctcccgggttcacgccattccccggcctcagcctccctagtagctgagactacaggcacccgccatcacgcccggttaatttttttgaacttttagtagagacggggtttcaccatgttagccaggatggtcttgatctcctgaccttatgatccacccgcctcaccctcccaaagtgctgggattacaggtgtgagctaccgcctccagccataaagttcacatttttaaaggacacacgtcagtggttttcagtctcttcacaaagttgtgtaatgatcatcactatctaattctagaacattttccttaccctaaaagaaaccccatacccattggggttcactccctatgcacccctcttcctttctcctgacaaccactaatctactttctaaatctatagatttgtctgttcgggacatttcctataaatgggactatataaatatgcccttttatctctggcttccttcactctgcataatgttttcaaggtttgtccatgttgtagcatgcattagtacttcattcctttttctggcccagtaatgttcaattgtaggaatataccccattatccattccaatgatggatattttttgggggatatccactttatggccattataatttcactatgaacatttgtgtacaagtttttggttggacatacgttttcatttttgttgggtatatagctaggagtggaattgctgggtcttatggtaactatgtttaacattttgaggaactgggatgtatagcgttttgtgcctgtgttatgaaactaattatgaagcatcttatattcattatcattagatctgtctcctccattaggttttaagtttcttgagacagggattatccttcttcatctttgtatcccccacagtccagcactcaccaaggcacaaagtaggttcttaggaaactggtcagaataaaactgaccaatgcaacatcctccttcccttaaaatcaccagcatacctgggaacacaggctttctctttctctcttccctgtagcaagtgacagcttatcaggaatggaggcagctcggtattatccatcaagccttccagctgggtgcacaccctccttatctgctgtgggaccttcaccagcatcctgggatttcctcaggctgcctcatccccacaacggcagtgatgtgacccactctggtttatgcagatacgttaagagagattattttaagtaccactgaaacccaagcagaggcaaggctggtggaaaccccagtatttgggggcacactccctgtttgacatggttcaggaatgactcatacatctactttaagggggatttggacaaggaggcactaagatacctatccaggctttgacttgggagcattgtgcaggaggtttaagaaagattattttaagactatctcagaaggctggagcagcatctttctgatttcttctgctacctttcactcggagcctgtgatttctaacatgtatttcaggttggatttaagagagagctggcccctactgaattggccacctttgatgttacagtactgaggaggggagggacagatggaacaaaagtcgtaattgcccaaatttacaataggttcccagcagcagctcgcacaaaagaaatgttaatgcaataaactgtaaatggaaggaagctaagcaggatttatggctggcgcaaacctccatcaaggcactggaacctctttccttcatctgtgaggcatttcagtggtcacagtagaattgggctcatttgaaaatcagtggctgctctgtgtcttccctcccttgtgtgtcctgcaccccctacacaaaccaattcctgtaaaaacctggggaatctgatagaacaattggagaaaaacatcagtcattgagggtcaagactgcaaacccggcagagccaagagtgcacacacatttgctgtgcacatgtatgtgttacagctgcaaccaaagcgtgcgttttccttccccaagtctgtgttggggacttccgcagacacagcagatggccagagtgtttccacgtttcagcctcgaagtgagagggcagcatgtcattcaccagcctggcacttacccatccatcagggccacctctataaatggctgtttttcacatttggttccagcaggttccatctccattccggctcacacatacctttacctgtgttgtatcatgtggggtgctccttgtctccttgtccagattgctggcccgcttgcttcattaattaaccgaggagcacgtctaaatggaaaattgctttctgagatctgtgtgtcctggctccatgctgtgaggggctccctgtaattaaacacgttttaagagttgctgtcttgcgcatgtgccctggacatcggtgctttccccactggctgggtagttctgtttcagaccttagacctaaatgataataacagttacaaggaaacttgcatatcagttgattaagtgtggggaatttttttccttttgaaagttgggggaaagaactcctcagtggggaagtgatttttctgccctgtagggatgggaaaatggttaatcatcatgggggcctcaacagacctcagcatgttcgcgaagtccttggcctcaggttcctcatccatcccaccgcgagagcgatacggcttgggtaagccgcgaatcccctcactgggctccaattattccagaattctaactttaaaaataaaatattcatatttaaaagttcctgctaccgtttcaaagaagcttcccaagaagctcttcagagctggggcatggaggaacctgtcactgggtccctttctgctgggggatcagttccttttataagtaggaaaagatttctccataccccttgcaaagttcatggctgacacccctataacaaaagacaggttaacaagagcaaagcacacaaatatatttaatacaagttttatgtgacacaggaggcttctgaaatgaagcctcaaagacccagggaaaaccgcgtttttatggacagtcaagcagaaatatgatgagagaacaaaagggtttgatgtagcgtaataaacttagcaagcccgttcagattcttcttggtgttcctgtgtgacattttttttttcctttttgttttgagacggagtctccctctgtcgcccaggctggagtgcagtggcgtgatcttggctcactgcaacctccgcctcccgagttcaagagattctcctgcctcagcctcccaagtagctgggattgcaggtacgcaccaccacacctggctaatttttgtatttttagtagagagagatttcaccatgttggccaggctggtctcgaactcctgaccttagatgatcccctgccttggcctcccaaagtgctgggattacaggaatgagccaccgtccccagtgtgacatttcttttctctgggtacagggcaggacacctgtcacatgagggtcttcaggggaggagggagaaggtcagagggtgaccttcctacttctgcagttttctcgatttctttcagtttacagtactcagtaggacaaggtgcatatttggggatatcgtgttctgagccccaacagtaacaaagaacaaagaaagcctttaggcagtttttgctgagactctcaaataggaatttagagtgatggtccttgagtcagagaggccactagagaaagtttgactttccatgtagaatagcaagctctcctctggcaagtcttttccagacaaggctctataattttttgctaataaatgtgtggacaaagttatgggatgtatagaagtctgacaccaaaaccatgtcagagactttttttttttttttaaaccgagtcttactctgttgcctaggctggagtgcagtggcatggtcatggctcactgcagcctcaaccttctaggcccaagagttcctcccacctcagcctcctgaatagctgggaccataggtatatgccaccacacccagctaatttttagtttttttatagagacagggtctccctgtgttgcccaggctggtctcaaactcctgggctccagcaatccttccaaagtgcagggttatagacataagccactgcacgtgtcctgtaacaaagattgttagtaaaagttattgaaatttaaatctatgattcaagtcctgatacataagacacatggcacatggtaaaaattgatttgattacatcctaggaggcctagacttgggaaagaaggaaaaaaaaaagtatgaggctgggcatggtagcttgtgcctataatctcagcactttgggaggctaaggcagggggattgcttgaggccaggagttcaagaccagcctgggcaacatagcaagaccccatctctaccaaaacaaaacaaaacaaaacaaccacaaaaaaaacccacacaaattaaatttaaaaagaaaaagatgaaaagaaagatgagaagataaggaaatatctgtagacagtttaagtctctatttttttctacaaatgtacagttatgtattgtaacatactgcatcttttgaccctgtcttctctgtttcaacagagcttatctttttctatgtatttctgctgctactgcttttccaaaccacagccattgtcctgtaatgcccttatgcatttggccaagccctcttagcttctttattattgtggggtcttagttgatatttggggtgtatgacattacaaaacacatgggatgtagatgtggattgggagagcccctgaattgtagcactctgctttcctcatctgtaaaatgggtataatcaaagtcttggaagggtaattgtaaaggggtgtgcagacagtggggttactgttatttgcaaggatccgcccatagttttatctgcaaatgtcactagcttttgatttactcactctcgcttgcgtcttctttcgtgctgatgttggctctgctttatcccacaggctttttattattattattacttttgagacaaggtcgctgtctgtcacccaggctggagtgcagtggtgcaatcttggctcactgcaacctctgcctcccaggttcaagtgattctccccactcagtagctgggattacaggcacgtgccaccacacccagctaatttttgtatttttttggtagagatggggtttcaccatgttggccaggctgagtgatcctcccgccttggcttcccaaagtgctgggattacaggcatgagcccctgcacccagcctttctttctttctttttttttttttttgagacagggtctcactgtgttgtgcagtggctcgatcttggctcactgcaacctccgcctcctgggttcaagcagatctcatgtctcagcctctcgagcagctgggagtacaggcacccgccaccacacccagctaatttttatattttttggtagagatggggtttcaccatgttggccaggctggtctcgaactcctgacctcaagtgattcatttgtctcagtctcccaaagtgctgggatttcaggcgtgagccaccccaccgggcctcccaacaggcttttaaagcaccagggcagcagggcactgggccaacaggtatatttgggaatgtgcatttggtttcatgtgtaataggaaagagattaattaaggttgttagtgtggcctaatactaaatttcaggaagcctcacaggacacatgaaacaaatctttacaacacatatgtgttttcatgctgctgaacattttgaagacgttttgccatgctggagtttgtttgttttgtttgtgtttttgtttgaggtgccgtcttattctgtctctcaggctggagtgcagagttcagtggcacaatcttggctcactgcaacctccacctcccaggttcaagctattcttctgcctcagcctcccgagtagtgcctggctgctgttttttttttttaattgttaaattagatgggctcagtattaccgtgccttgatggagtttctagttgagggatcagtgtcatttctgggtccccatcagaattacgttcaagctataagtagttatgcaaagtcgtaggttaaatgatttgggaataaaatgtcatttgacgtgacagaaatgaacccttggaggcccacatttccactgggacttgctctcagttccagttctcatgttaagtaattttattaactgaggcaaggaggggcatgcggtgacaagggaaatattttttgctaacattttaatcctaatcacaaaatttattgtgtgtggctttatatgcatttgtagctataaagccctggaagatgatgaaagtaaaaattagaatgtgtggtttttctgcccaggtgttatttaaagcattgtatgaattgtcaaaaagattaattgttgttgcttgcagctaaacagatgataaattttaaaattatattattactgtgtgtcagcataaaagctctgtgtcccaagtgtgtcacctttttctgttgctgttgacaaggttcacattttatagcacaccgccagaaggtgttgacatatattcagattactgattaaatgtttttaaaacgtgccactcagaaactaacactgatgttctatgaaagagtcatttttcggagtaagattttttttttcccttcatcattaacatggaggaaatgttaaacactgacattttaaaaaatgaacctgggactggcgcagtggctcatgcctgtaatcccagcaccttaggaggccgaggtgagcggatcacctgaggtcgggagttcgagaccagcctgaccaacatggagaaaccccgtctctattaaaaatacaaaattagctgggtgtggtggtgggcacctgtaatcccagctactcgagaggctgaggcaggagactccctcgaacccgggaggtggaggttgtggtaagctgagatcgtgccattgcactccagcctgggcaataagagcgaaactccggtctctaaataaataaataaataaaaacgtggctgggcgtggtggctcacgcctgtaatctcagcactttgggaggctgaggcaggcagatcacgaggtcaggagttcgagaccaacctggccaatatggcgaaaccccatctttacgaaaaataccaaaaattaggtgggcatggtggcacgcgcctgtaatcccagctactcagaaggctgaggcaggaaaattgcttgaacccgggaggcggaggttgcagtgagccgagatcgcgccaccgtactccagcctgggtgacagaccaagactccgtctcaaaaaaaaaaataaaaataggccaggcgcagtggctcacgcctgtaatcccagcactttgggaggccaaggtgggcagatcacaaggtcaggagttcgagaccatcctggctaacaaggtgaaaccccgtctctactaaaaatacaaaaaaattagctgggcgtggtggcgggtgcctgtagtcccagctactcgaggctgaggcaggagaatggcgtgaaccacggaggcggagcttgcagtgagccgagattgcaccactgcactccagcctgggcgacagagcgagactccatctaaaaaagtaaaataaaataaaatgaaaataataaataaataaataaacctaatgttactgcactttcccatttcaaattgcagccagcaatgaaaacaggcattagcattcccatttcttctcttctccttcactggaagggcaacaacaaacacacccacggtgtaaaaacagcaccaaggccgggtgcagtggctcacacctgtaatctcagcactttgggaggccgaggcatgcggatcacctgaggtcgggagttcgagactagcctgaccaacatggagaaaccccatctctacttaaaattaggcgagcatggtggcgcgcgcctatgatcccagctactcaggaggctgaggcaggagaatcacttgaacctggaggcggaggttgcggtgagcggagatcgcaccattgcactccagcctgggcaacaagagaaaaactccatctcaaaacaaaacaaaacaaaacaacagcaccaaggaaggcgctaaatggctacttgtaaacaacccaggttggacactggacccacgacaaggaggcaagttccgtcctgtggtggtgtttgtgatgggaagtctggggctttgactccctcaagtttccaggctaacacacacaactcttcccagcagctgaggggccccgaagccttgatgtccctttcacgttgaaggacctcactggtcttggctgtttgcgttttgtggatggagtgggccagtcttcagagaactcaaatgtgtatttgctgcagggagtgataagtaaacataatgcctcaagaatcaacatttgaatgcttttctttttggcgttaaggtataatgggacactggcaatatatgctgtctctctgaacacagcatgaaagaacttgaaaacaaatgatttagtattcattacggaaaagttggatttttttccctctctgattgtcaagatttcttcgtcgatgtcagttttccagtgtgaatttttcctctccactcagaggaagttgacgttggttcagtgatgttacagaggatgctgtaagacagccaggagcccaggccggttgtcacttcatcccagcatggtgcaaagttagagatgttgcagtgacagccttgggtgccctcaggggcaaccaagtctctaaataatctctgtgaccaaaagtacataggaggttgtaaatatcccacaacaaaaataaagatagctgccatttcccagaacttaatgcatatcaggaaatgttacctctttatatatattgtctcatttaaatccagtaagatagcagcagctgtgggaggatgtggtttttgtttttgtttttgttttgagacagagtcttgctctgtcacccaggctggagtgcagtggcgggatctcggctcactgcaagctccgcctcccgggttcacactgttctcctgcctcagcctcccaaagtagctgggactacaggcgcctgccaccacgcctggctaatttttttgtatttttaatagagacggggtttcacatgttagccaggatggtctcgatctcctgacctcgtgatctgcctgcctcggcctcccaaagtgctgggattacaggcgtgagccaccgcgcccggcctgaggatgtggttttattcccatttaacaaaggcttgagtatcacttcttatttatttatttattttattattattatttttgagacgaagtctcactctgtcacccactctggagagcaggggtgtgatctcagctcactgcaacctctgcctcccaagttctagtgattctcctgcctcagcttcccgaatagctgggagtacaggtgtgcaccaccttgcacggctaatttttgtattagtagagatggggattcaccatgttggccaggctggtctcaaactcctgacctcaggtgatctgcccatcttggcctcccaaagtgctgaggttacatactttattaacaaaggagtgaagtgataccccctctcccctgtaagtagcagccaacattcaaacccaggtgtgtcagattttagagccacactgacattcagcagctactgactgattgtctactatgtgttaggcattgttttcatcacaccttttattttttgttttgttttttagggacagagttttgctttgtggcccaggtgtagtgcagtggcatgatgtttgctcactgcagcctcgagctcctggcctcaagtgatcctcctgttttggcctcccaaaatgctaaggtgctgggatcacaggtatgcgccactccgctcagcccacatatttttaagtctgctttttaacctaatttacttattttgggggtcttaaaaaattggctcacagccgggcgcggtggctcatgcctgtaatcccagcactttgggaggccaaggcgggtggatcacgtgaggccaggagttcaagaccagcctgatcaacatggtgaaaccctgtctctactaaaaaatacaaaaattagccgggcgtggtgtcgcatgcctgtaatccgagctacttaggaggctgaggcaggagagtcgcttgaacctgggaggcggaggttgcagtgagctgagatcacaccatggcactccagcctgggcaacaagagtgaaattccgtctcaaaaaaaaaaaaaaaaaacctatttaaaaatgaaggctcatgcagaatgctctgcaagttcaaaataaaacagagctctgagcgcctagaggctttttgccttaaggggcgaggaggaaaaagattaagatgctccttggaaaatagccctttttggctccatctcctttactgtggtcacctgcacatgcctttagttcttctggatttatatctaagcacgttgctctgctacataagaagctgacaacatcagttaccttcctggaggtgaaggagagacaaaggggctgagtgggtgagaggaatactttccaccatgaactctttggtacctttcggaaccacgtgaatacagtatcttttcaaaagaaaagggtgctatattcattgtcctagactattaagcactttaaaaggcacttcaggtaatctagttgaagtgcaaatttcactgaacccagactattatgcaaacaggactagctctgtatttattcttttatgttgtggcttgccatccaatttgtgtttccggggctgggcacgaggtggctctagcctgtaatccccgcagtttgggaggccaaagcaggcgatcagttggggccaccatctccattgtccctttttaaatttaagtgaccatagcttcttagtatgatatcaggtttttgttttcttcccaccttgtctttgttttttagtgtgtggatgcctttgaaattagtttttttgtttgcttggtttttttttgagatggagtctcactctgtcgccaggctggagtgcagtggcgcgatctcggctcactgcaacctctgcctgccaggttcaagcgattctcctgcctcagcctcccaagtagctgggactataggcacatgccaccatgcccagctaattttttgtatttttagtagagacggtatttcaccgtgttagccagagtagtccgatctcctgacctcgtgatccgcccaccttggcctcccatagcactgggattacacatatgagccactgtgcctggccaaaattagttcattttttatacatgtcctttacacaggagatgtattcagaaagattatctatattttttcctttaaacaatgcatttgtttgtttgttttatttgtaagctcatctcctgggtttagagcagaatgaaaaatttgaccttaatcttctcttatccactggttggaagctcctacttttatgtcaacagacataaaaaagcttatacatataagataatgtatagcatgcataaagatttatagaatgctatgtctcataaatttcacagttataaaacaaaacctaagcttatgcatgtggagatattcctgtgtttgcagttgtcagtgacttctagagaatgtggtaaaggaaaaaagcacctgtggaagttatttatgtaaaagttgcttatgtaaagactcaagccattaacaagagaaggagacttctttatattgttaatgacattcagatctttcttctgaatgagggttgtcactctgaatgagtgttgtcattcatttcctccaagccttcagatatctttttcctttatctgacacatttcaggaaagagtaagggaaagatttatttatattactttgatggtttcattttctttgtggaagtccagtgacccagatatagagatcttcttggaatatattactttgatggttactttctctttttggaagtccagtgacccagttatacggatgtcctcagaacatttgaagtctagttctgcattataaaatagcccagttgccataggttgatttcctgtaaacctaaatcatgattgcaaactaatttggatgctaattaggactcatataatgattatatcaatttataacttgtctaacaacaatgcatttctttctttgctaggttaagtatttacactatgacctgtgaacagggaaaccggcctgtgttgagtactttctatgagccaggtgctcgactgtgtacaaacttagaagaaccaggtgcacacgccaggtttgggggccgtttgacagtcagcattcaataaatgtgttgtttaagttgatataattaatttaaaaggaagtagcaggtgatggtagtacacttcattgtcctagaatattaaatactttgttgtcagcagacggacttctttcatatgcacaggtcatcttgagcacggatcctaagcctagtctttaatccttcctagcatcctacatgagccaaacttagacaaaaaacaaggcaactcttggttatctagggcaatttgaaatctcagctacctccactgtgtccagctcaccgcagttatgcatctatttacaacattatgtttgcaacattatgtttaagcaaaccacaatgaaagcattaaacatagaataactatgatccagcaattttacttccaagcatataccgaaaagtgttcaaagcagggactcagatactgtgttcctgggtacatgggtacacccatgtttatagcagcattattcttgatagccaaaagatggaagcaacccaggtgtccatcgacaggtgaatgggtaactacaatgtggtgtacacatgcacacacacacacacacgcaagaatattattcaaccttaagaaagaatgaaattctaccagtcacggtggctcacatctgtaatcccagcactttgggaggctacggtgggcggatcacctgaggtcaggagtttaagaccatcctgaccaacatggtgaaaccctgtctctactaaaagtatgaaattagccaggtgtggtggcacatgcctgtcatcccagctacttgggaggctgaggcaggagaatcgcttggacctggaaggtggaggttgcagtgagccaagattgtgcctttgtactccatcctggagagcaaaattccatctcaaaaaaaaaaagcatgaaattctgatacctgctataacacagatgaaccttgaagatatgctgagtgaaataagccatatgcaaaaggacaaatatgtgattgtacttatatgaggtacctagagtagtcaaattcacagcacagaaatgcgaatggtggttacccggggctggggggaaggagggaatggggaattggtgttagtgggcttacagtttcagtagggggtgatggaaaagttctagagatacatagtggtaatggatgcacaatattgtgaaaggacaaaactatacctaaaaatggttcaaatgctaaattgtatgttatgtatattttgccccaatttttttttttgtttttttttgttttaaagacagagttttcctcttgctgcccaggctggagtgcaatggcatgatctcggctcactgcaacctccgcctcctgggctcaagcaattctcctgcctcagccttccaagtagctgggattacaggctcgtgccgtcatgccccgccaatttttgtatttttagtagagacagggtttcaccatcttggccaggctggttttgaactcctaacctcgtgatccacccactttggcctcccaaagtgctggcattacaggcgtgagctaccgtgcctgacgtattttgccccaatttttaaaagcaacataataaagacaaagccactgggaaggatataaaatgcccctgagccaaacactgtatagccaaaagagcaaaactacaaaaactgcaccaagcttctttgtaaattcattcttccaccctccaggacactcttgcctggtttgcatcctgagagtctcctggggttccagttatttcaaggtcacagtcaggtaggcacggtggctgtgctatggtggaaatggcttttggattcctcgtaattttggattatcggtgccctgtttttctgagaccaaaacttatcaatagagtattacggaaggtgatatgtagtaagtgcacctttcttgggcattcagtctaaattcaatagtaaagggaaaatcacatatagtcaagtccaaattgctcatgatgttacagtagatctacatgtccctaacttgattacctattttccctccagcactggagtgcatctctgcttcttcagccgagctccagaaggagaagatggctgcatttagagtcagactggaggaaaaggagcattttgatattttattttatttttatttattttttagagacaggttcttgtgttgtcatccagactggaatgtagtggttgcagctcactgcagccttgacctcctgggctgaagccatcctcaagcctcagcctcctgagtagccaggactacaggtgccgtgccaccaagcccagcgaatttttgtatttttttgtagagacggatcctgctgtgttgtccaggcttgaaatttgattttaaacatattaggcatcacactaagcccccaagacaagatagaagcttacagaaccttgactatctggaatgactttcacagagtgatttcatctttcttcttaccctcaatgagtaacgtgaaggctgagcaggtcatactgttcaaattatttatcttctttagacttttttcttccaaacaccagtagttgaatttgagtactttaagtgctagtattatgcaatttcattttattttattttattttatttttgagacagagtcttactctgttgcccagactggagtgtagtggtgcgatctcggctcactgcaacctccgcctcccgggttcaagcaattctcctgcctcagcctcccaggtagctgtgtttacagtcatgcgccaccacgcccggctaatttttttgtgtgtctttagtagagacgggatttcaccgtgttggccaggctgatctcgaactcctgacctcgtgatctgcccccctcggcctcccaaagtgctgggattacaggcttgagccattgcacccagcctggattaatgatttcgaatgaacatttacaatgatatgttttataataaaacacattaaaaagtttgaaacactagttactagaaacagttctctctgtaatgacagttagtcatgttgttgctgcagtgacagttgacttggtgtgagggtattgataaagcctggtgatttgtacacttgcccatattatgcttttcccaggctagctatgcaaatctcatttcccttacatttgaaagtcatttcagaattgtttcattagggttgaggcaagcacaaatcatgaatgcctgtgtcttctaccaccaaacagattctgttggacccacaactgatatgctttcagccaggttccatttagcattcaccctggacttagggactctacaagagtgctgggtatttagttttgttttgttttgctttttgagacagagtcttgctctgtcacccaggctggattgaagtggcgcaatctcagctcactgcaacttccaccccctgggttcattctcctgcctcagcctcccaagtagcagggattacaggtgcccactaccacacccggctaatttttttgtatttttggtaaagactgggtttcaccatgttggccaggctggtcttgaactcctgacctcaggtgatccacccgccttggcctcccaaagtgctaggattacaggcgtgagccctcacacccggcctgatgctgggtgttttgtacagtggtcccaccttactgtgtagaaattctcagtcatccacctaatttgtttatttcccattcatatacttcatttattcactcactcacttggccatttatgcatatttattgattttgttaaaaagatacctgaatgagtggaacactgagatgatatagtggaatggacggatagtggttagccccttggacccatgagggccaggttctgaaattccagctctgaaattctaccagctggttgaccttgggcaaattacttagcttctctgtgcctcatttcttcatttataaaatggagataataggttaagagggttagatgagacattcattcatagtacttggcacacagtaagagcccagtaaatactagctgttgttatggattgaattgtgttgcctccccacaaactcatatgttgaagtcctaaccacaggtactcagaatgtgattgtatttggaaacatggccattgtagatgtaattatttaagaagagtgattaggctgggcatggtggctcacacctgtaatcccaacaactttgggagcctgaggtgggcggatgatgagggcaggagttcgagatcagcctggccaatatggtgaaaccctgtctctactaaaaatacaaaaattagccgggcgtggtggcaggcacctgtagtcccagctactcgggaggctgaggcaggagaactgcttgaaccaggggggcggaggttccagtgaaccgagataacgccactgcactccagcctgggcggcagagcgagactctgtctaaaaaaaaagaaagaaaaaaaaggagtgattaggttgggcactaatccaatatgattgctgtccttaaaaaaagagaaaatttgggcacagagatagacatgcatagagggacaatggccatccacaagccaaggagagggtcctggaacaaatcctttcttaccagtcctcagaaggagccagccctgctgacacctcagtttcagacttccagcctccacagctgtgagacaataaatgtctgtcagtgaagccactcagtctgtggttctctgtcacagcagccctggccgaagacacagctggcagcaccgtcctccgctactgtgtttctcattgacccgagaacctgcctttgtccatgtcctggccaatgggagatacattttctccttctcagcttgtattcctgtccttttctttctttttttacaaaatagcatacaaaaaagttcctagcaagaagaggtgctccagaagttccctggctgtttcattcctgtgtctcttcctaaaaagctgcagttgaaaagatagaatttgttttctcttagcacattcttctcactttctaagcttgatttttctttctttgaaagagtgtaaccccttcaaaattaactcctagagattgctcacctccctcccaaactttcgatgaggagcgtttattttgtagactcttatgtgtgaattctttcaataaataggggatgcagagaagcagctttgtggagtgaagcagtaggaaagagcctgttggggagagagcttcgccactgcatttcagtagctggtttcgcccctaccttttttttttttctttctttcttttttttttttttttttgagacggagtctcgctctgtcgcccagtctggagtgcagtggcgctatctgggctcactgcaagctccgcctcccaggttcacgccattctcctgcctcagcctctccgagtagctggggctacaggcgcccgccaccaagcccggctaattttttgtattttcagtagagatggggtttcaccgtggtctcgatctgctgacctcgtgatctgcccgcctcggcctcccaaagtgctgggattacaagcgtgagccaccgtgcccggcccacccttacctatttttaaatggtgacttgtgtttttatttgtttgtttttaaagacacttgaaattggacagtgtttctccatcctctccagaggcccagagcaatgtcgcaaggatgcattctggacgaggcagtcacggggccgcacatggcatttgttcttctcagggaccgtctgctgtgtttctctgccccagtggagctgggggaataataaagctcttattatttatactgcacagcatttttttcagtggtccttgtcattgagacttatgaagacaatgtaggacaagagggaacttgtgagtttttatgcaggtagggaagaaaagtaaaaggggctatatttccagggatattgctttttcccaaacccctgcacttccccagtccttttctttatcttcctttcccaaatgagaggtgtccttcttctccggtatcagccccctagtttcttccctgtcctcggggaatcttggtacaccatttagcccctgtcttggtttttgactctgtccctttgtggaattcttacccatagcttacagtgatgtttcacatacatctctgccaaagatgaagtggaaaataacctttgctttgtaagcacatctccttcaagctatcgacaagtctcctggcttctcttagtttctaacccctttttttttttttttttttttttgagacagagttttgctgttgttgcccaggatggagtgcagtggcgtgatctcggctcactgcaacctccgtctcctaggttcaagtgattatcatgcctcagcctcctgagtagctgggattacaggcgtctgccaccacacccagctgatttttgtacttttagtagagaggggttttgccaggctagtcttgagctcctggcctcaagtgatctgactgccttggcctcccaaagtgccaggattacaggtgtgagccactgctcacagttatctatttgtcttagtccatttaggctgctataacaaaataccataaactgggtgtcttataagcaacagaaatttatttcccacacttctggagacttggaggtccaagatcaggcagtggcaggttcagtgtctggtgctaaggaagcacctgcgcctcccggtccacagacgcacaccttctcactgcgtcctcatatgacagaaggggtgagggagtccgtctttttttttttttttttttttttgagacggagtttcgctctcgttgcccaggctagagtgcaatggcgcaatctcggcacgcaacctccacttcccgggttcaagcgattctcctgcctcagcctcccaagtagctgggattacaggcatgcaccaccacgcccggctaattttgtatttttagtagagatggcgtttctccatgttggtcaggctggtcttgaactcccgacctcaggtgatctgcccacctcagcctcccaaagtgctgggattacaggcgtgagccaccgcacgcagctttttttattttttattttttaatatttttgagacagagtcttgctgtgtcaccaggctggagtccagtggtgccatcttggctcacggcaaccttcacctcctgggttcaagcgattctcctgcctcagcctccagagtagctgggattacaggcgcccaccatcacgcccggctaattttttgtatttttagtagagacaggatttcaccatcttggccaggctggtctagaactcctgacctcgtgatccacccgccttggcctcccaaagtgctgggattacaggcgtgagggagtctgtcttttataaaggtgctgatttcatttatgagagctcagtcctcgtgactaatcaccaaccaaaggcctcacctccacatttgatcacactgggaatgaagacttcaacatactttgcaggggacagaaacattctgtctatagtaccattaactttctgctatggaagttgaagacagttctcttttgtcgtattatacccctgatacacacttcagtgtttatactgtgccaaggaaagcagtgttcacagctgagccatacggtacactacaattttcctttctcatataactttttgtccccttggagttagcaattgactttttttttttttttttttttgagacagggtctcgctctatagcgcaggctagaatgcagtggcgtgatctcggttcactgtgacctctgcctcctgggctcaagcgatcctcccgcctcagcctcccaagtagctgggaatacaggtgcgtgccaccatacccagctaatttttgtttttttgagttttttttttggtagagacagagttttgccacattgcccaggttggtctccaagtctggagctcaagaatctccctgccttggcctccaaaagtgctgggattacaagtgtgagctaccacacctggccagtgattgactcttttgctaaaactaattttttcttccaactctttgacaaagtcgtcaatattaagcaatatacccttactacttttgattttgtttttaaaggaattccttctggagtcttctatcctgaacttgtcgctttctaggccagctgcatttctgtgtttctaaaacttccattgtttataaaacaccataatcctggcgtttgctctgtttgtactctgtatttccagtatctggaaaccatgtcttctttcttggcttatttcctcattcagggctgtgtgtcttctagtagttatgtgaaaagagggttcgtgaaagttaaatgtttttgaggctatatgtctgaagaggtctttggtgttcttcagacttcatggaaaacattttccctaagaatgttaaaggcattgctcccttttttgcttctaatgctgccattgctttaaaatggtgccattttgattcttgatcctttttctgtaaatttttttctctcttgaaaatctctttcttgaagatctctcttgaagatctctttctccctagtcctctcaaactttgcattgatgtactttgatgggatcatttttgttaattatgtaggtgttccataggcctttcagtctgaaaatttatgtgttttagttctaggagctttctttgtatttctctatttctttttttttttttttttttttttaagacagagtcttggtctgtcgcccaggctggagtgcagtggtgtgatcttggctcactgcaacctccgcctcccaggtccaggtgattctcctgcctcagcctcctgagtagctgggattacaggcatctgccaccatgcctggctaatttttgtatttctagtagagacggggtttcaccatgttagctgggctgatcttgaactcctggcctcaggtgatccgccctccttggccttccaaagtgctgggattacaggcatgagccaccatgtctggcctcaaatttttatttttgatagctttttcatgttctctaatgtttctgattgattgattgattgagaaagggtcttgctctgttgcccaggctggagtgcagtggtgcaatcatggctcattgcagcctcaacctcctgggctcaaatgatcctcctgcctcagcctcccaagtagctgggactacaggcacaagacagtatacctggctaatttttaaatatatttttttgtagagacagggtttcgctatgtgcccaggttggtctcaaactcctgggctcaagcaatttgctttcagcttcctaaaatgctaggattacaggtgtgagtacatggcacctggccgtgtttgtttgtttgtttttgagacagggtcttgctctgtcacccaggctggagtgcagtggtacaatctcggctcattgcagccttgacctcctgggctcaagcaatcctctacctcagcctaccatgtttcttttataaatgatattttattcctgtttttgcatgtattataatatcttatttctctgtttgttctgttttttgctctgttctgctctttgcattgtccgtttctcttgagtgctcttcctggttgtttgtttcggtttttatctttcaagttgataacttttgtcgaaggtctggtggtgtttgactgtcagtccatatttaaaaatgaggaactggcctggtgtggtggctcacgcctgtaatcccagcactttgggaggccgaggtgggcggatcacctgaggtcagctgtttgagaccagcctggccaacatggtgaaaccccatctctactaaaaatacaaaaattagcttggtgtggtggcacacgcctgtaatcccagctactcaggaggctgaggcaggagaactgcttgaaccggggaggtagaggttgcagtgagtggagactgcgccactgcacttcctcctgggtgacagagtgagactccgtctcaaaaataaataaataaataaataataaaaataaaaatgaggaacttaaggaccaggagcagtggctcctgcctctaatcccagcactttgggaggccgaggtgggcggatcacttgaggtcaggagttcgagaccagcctggccaaaatggtgaaaccgcgtctctactaaaaacacaaaaaattagccaggcatggtggcgggtgcctgtaatctcagctacttgggaggctgaggcacaagaatcacttgagcccaggaggcagaggttgcagtgagccgagatcataccactatactctagcctgggcaacagagcgagactctgtctctaaataaataaataaataaataaaaaggaggaacgtaaccatcaatagagagttatttgtgtatggaactgatgggcctcactgtaaggttatcagctgggggcccaccagcttcaccagaggatcaccacatatcagtgtctgtaggcttgttctcctgggctcttctgtttttcagagaggtatcctgtgctctccagcttcgggggattagacctggcttccagcattctagaagccaaggctaggaggcaactggggaattctcattattccatacctggactttcactcagcccgtttcagcttttgactaactcctccccttcactgtgttttgcctccacaaagtgaaagctttttggggttccatttctccagggatttacttcctttgcccttttggaatgggacaggttaaggtctaagtgctctttatagagattttctttttttctttttcttttcttttttttttttttgagacagtctcactcggactggagtgcagtggtgtgatctcaactcactgcagcctggacctctagggctcaggtgatcctcctgccttagcctcccaagtagctgggactacaggtgcatgccaccatgcctgggtaattttttgtattttttatagagctcaaggaatccacccgccttggcctcccaaagtgctgggattacaggtatgaatcactacacccggcctgtacggattttcaaacaatccttttgttccaacccactaccctgccttcagagataccaggaacctctagttcctaagctgttccagagtcctgtggtagaaataagcttgatgcttttggcttgtcatgtttctcaggtcccggggctgcaggaagttagtagtcagtgttttcacttgttgattcactctccatttgccagtggtttgttaacatctcttataagggattgattcttctgttatatctgtttctgtggatttatactcctcccctcttcattgtgggttttagaaagaaagcggagacaaatactaataataatctgccatgttatttagcaaactttttaaacatttttaaattatgaatgagtattgaattttatcaaatgctttttctccatctcttgagatgttcaaaaggcttttcttttctcatctgttaatgaagtgaacaataataaagtgttttgtaatgttaaattgtccttgctttattggtgtaattttttttttttttttttttttttttttttttttttttagagacaaggtctcgctatgttgctcaggctgggctcaagtgattctcctgcctcagcctcccgaatagctgaaatactggtgtgcgccaccatgcccggcagacgtcatttttcagtttgctgaaattctgaattttatagaaatgtaaaattgagactggcctatatttttctttcttttcttttcttttttttttttttaatagagtctgtcgcccagactggagtgcaatggcgcaatctcggctcactgcaacctccgcctcccgggtccaaatgattctcctgcctaagcctcccaagtagctgggataacaggcatctgccaccatgcctgggtaatttttatatttttaatagagacagggtttcaccatgttggtcaggctggtctcaaactcctgacctcaggtgatccacccacctcggcctcccaaagtgctgggattacaggcgtgagccaccacgcccagcctatacttgtttttgcctccttcagtttttatgcttttttcagaaatgaattgggaaaaaattatgtgggaaactttccctcttactttaatttcttttcttttctttttttttttttttttttttgagacggagtttagctcttgttgcccaggctggagtgcaatggcacgatcttggctcaccgcaacctctgcctcccaggttcaagcgattctcctgcctcagcctcccaagtagctgggattacaggcatgtgccaccacgtccagctaattttgtatttttagtagagacggggtttctccatgttggtcaggctggtctcaaactcctgacctcaggtaatccgcccaccttggcctcgcaaagagctgggattacaggcgtgagccaccacgcccagcccccctctttaatttcttgaaccgcttgtataagatatgaattatctgtttcttgggctggcatggtggcttacgcctgtaatcccagcactttgggaggctgaagcaggtggatcacctgaggttaggagttcaaaaccagcctggacaacatggtgaaaccccgtctctactaaaaattcaaaaattagctgggtgtggtggtgcacacatgcaattccagctactcgggaggctgaggcaggagaattgctagaacccaggaggcagaagttgcagtgagctgagatcatgccgttgcactccagcctgggcgacagagtgagactctatctcaaaaaaattagaaaaaaaaaaaaaaaaaaaaagaattattttttatttttttgaggcagggtctcggtctgttgcctaggctggagtgcagtggcacgatctcagttcactgcatcctctgcctcccaggctccccggatcctcctgcctcagcctcctgtgtaactgggactacaggtacacgccaccatgcctggctaatttttgtattttttgtagtgatggggttttgccatattgcccaggctggtctcagactcctgggctcaagtgatcctcccacctcagcctcccaaaatgctgggattccatgggtgagccactgtgaattcactgccttgagtaatctgtttcttaaaggcttttgttaaaacttgttagaaattatctgtacaacttgggtgtgtatgtgtgtgtgtgtgtatctgtcttgactactaatgcagcatatttaataacataggatcacttcagatttcctagctttcatttattgaattacagtacttttgattacttatatttatctggaatatagttcacattctctgtttttaagtttattgccataaagttgtttttagcattctcttactgttttttgtttgtttgcttttgtttttgtttttgttttgtagagacagggtctccctaagttgcccaggctggtctataactcctgggctcaagtgatcctcctgcctgggcctcccaaagtactgaaactataggcattagctacctctcccagcctcagaagcttttctacacccttcctaggggaatggggagataagtaggggtcacttagggagtaaatgattatgaaaaggggcatgggcttttgcaaaaataggcagtagcctgtccggaccaggtgccaagttccagcctcttctaggtttgactcctgttgcctgttaacctcccctgatagattaaaaaaaagaaaaaaaaaaaaaaacctagagagggttttcatgacaattggcttccttctggagaatctgcatttcactggataagggagattcaggaaaagcccctctgcatttgctatttcccaaatgccttcagcttgaagtaaccagcaaaccaattcagcatatttgggctggtatttcctggactcgtgtctatgaggcagtgcttcttcaggtgctgttcaagtcttactaaatttatgtccattagatctatccatttctgcttctggttgtgagtttatcaattacttctgtaattctaataattttattgtttatttcagatgtctgcaatttgagaaatatttttctgataaaatgttctttttatcattagataatgatcttctttatcctgagaatgtttttgccctagtttctatcttgtttgatattaattaattcagtcactcactcagcaatacctgttgagaattttttttttttctgagcagagtttcgctcttgttgcccaggctggagtgcagtggcatgatctcagctcactgcaacctccgcctcctaggttcaagcgattctcttgcctcagcctccccagtagctgggattacaggcatgcaccaccacgcctggcttattttgtatttttagtagagatttctcctacatggggtttctccatgttggtcaggctggtcttgaactcccaacctcaggtaagctgcctgtttggcctcccaaagtgctgggattacaggcatgaaccaccacacaaggcctattttttttttttttttaagacagggtctctctctgttacccaggctggagtacagtggtgagatcacggcaaccttcacctcctgggctcacatgatctccctgcctcagccttctgagtagctgagactacaggcaggcaccaccaagcctggctgaattatttatttatttattaattatgagatggagtcttgctgtgttactcaggctggtctcaaactcctgacctcaagtgattctactgccttggcctcccaaagtgctgggattaggcgtgagccaccatgtccagccaagaacctgttctatgccagtcacatcaagaaacaaaacaggcatcacctgacaatatatatatatattttttggagacggagttttgctcttgttgcccaggctggagtgcagtggtgctatctcagctcactgcaacctccacctcctgggttcaagcgattctcctgcctcagcctccctagtagcttggattacaggtgcccgccaccacacccagctaattttttgtatttttagtagagatggggtttcactacgttggccaggctggtctcaaactcctgacctcagacaagccacccacctcagccccacaaagtgctgggattacaggcatgagccactgcacctggcttgacagtatctttttattttaatcacctttttattttttactttcaaccattctgtgtccttctgttttaggtgtatcttttataaacagtattaaattgaaactttttttttctttaaatgtaatcttggtcttttagcagggatatttaatctgttcacatttgttgtgattgctaatgtaatcaaatttggttttactaccatatgttactaattttatatactatgctgtttacttactgtatttccccttttcctgcttttcattgtacttagttctctttattttttttaagttttatttattttattatagttttcttatttattctactttgcttatttcttcctattgatttagaaattatacattctattttttcttttggtgattacatttaaaatttaatatgcatattttatttgagtctaaagttaatggatatttctctgctctccttctgatcaaaatgcctcggaatattttggctctgatattcactcccagtctttcgtattccctgtgtagcatgttatcagagtctagtacttaactttttggttcatttttttttcagtactttgttttaaatgagacaacattataattgatattgctggctcatttagatttacttacatgtttactctctgctcaccatcgctcctttggatcccactcttttcttttggattgagtctttttatcctgaaatataccattggtcacttctctcagtaaaggtctaacaatagtaactttcttcagcctttgtatggagaacgtgtttattttgcccttcctcttggatgattgcttagttgcgttcaaggctaaaagctatattctctcaatactttgaaaatactattccattaatttttggttgattttgctgcttagtaacattctgctgtgaagaaaaattgttcttttttcatgggtaatctgtcttttctctctatgtgttctatagtttcactattatgtgttaggtgttgatttgtgattgtttatctggctcctgactgtgctgttcaatctgagaatgtaaatgcttctttccattctgaaaacatctcagtcataagtcctcattctttctattctctcattagcatttgttgtaaggtctcatgttccctcgtttcttaacatcttccatctcctacttctctgtgccatgtcctgtatgatttccccgcatccattctgtagttccctaattctttttttttttttttctttttgaaatggagtttcactcttgccgcccaggctggagtgcagtgatgtgatatctgcccactgcaacctccacctcccaggttcaagcgattctcctgcttaagcctcctgagtagctgggattacaggcacccaccaccacgcctggctaattttctgtatttttagtagagacggggtttcaccatgttggctaggctgatctcgaactttgaccgcaagtgatccacccgcctcagcctcccaaagtgctgggattacaggtgtgagccatgactcccggcccctaattcttttattggccatatgtaatctaatttacttactatttcagtgactctgtttttttccttctaaatctgctgtttggttctctttcaaattaatttttctttttttattttctttttttaaatatatatatatatttttattacactttaagttctagggtacatgtgcacaacgtgcaggtttgtaacatatgtatgcatatgccatgttggtgtgctgcacccattaactcgtcatttacattagttatatctcctaatgctgtccctcccccctccccctctaatttttattttcaatcgtgtcctattctttcaatggttactgttcttgtgtcactttaatagctctaaacacatatatcagattcttttttaggttgtcacttgtttccagttcccaggtacccattggcccgcatgttgtacttgctgacccttggcgtggtaggttagttcctggcctggttggaattttttattgtgagctcatcttcagcaggggttatttttgcctctgggagtccaggggccctggattgtggagatgtttctggagcactgctttacctttttcttctgcaaaccaaggctcagttattttagggtcttgaacaagttttaatttttaatttctctatttgtgatttccaacccatctgggtggtatcaacttaatccctgcatttgctcttagcacaggctcctgattcagatgattcatacaaaagcttttagttacttttcagagctcaagccagacctcaggcctccttcctgtttctttggtgagcatggttcttccagttcccttttcatggactggctagcttcttaaggggtctggtttggtccagtttccccctcatcttgcacagtcctggctggtgtcttctttccccaggggtgttgacactctgacccctacttattgtttcaagggctgacagccctcggtggatacatcagcttggaggtttcctcccagccctggagatttgctttgtttctggcacttgggaatctctctttcctctttctatcaagctgagctacgcatgaaaccttttttttttttaagttgctttagattttccaatagctgtgtgtaatttcagcaggagtgggtccgcatcaactcagcctgccacaaaccttattcatctttgtactctccaacccagaacagtcactggttcataccagatgctggatgaatgaatgagtgaatgaatgaatgcatttttcacttccagtagcagatagaagcagtattccagtgagccatgcctcctacctctccaggagcactgaatcaggcagaattcacttttctttgaggttatacgtagagagttcccagtgaaaaaatgaaaagagaatagggcttcttctatgcttttgttttaagtcccagaacaataggactgtttaactgctttgcactgcttgatatatgaaggtggactgacgactgagttcccatgccgcttgctggtggcttcacacagcatcattaccaagaggacaggacactaggactgtttacttccccctttctcccctgttttaagaaaagtgtgcctttgatgagatatagccgcaggctcttgttttacattgtacgtcaactgctgttgtcagaggctggttattgatgccatgccctgttttaattcacacttctctgctaatcaattacagcgtttatccattaatcaggcattctgacagggtcaataactgctttttggctcttgtgcagggctgcacgttatcaagccaggaataaggcccaggagctggctttaaaacaccgtgtgactttcccaggctggtggacttccggagcaataaacatctagtggggatttcatatggtgggtttttcatatatttggtagatgggattttctcactgaacacttcattaacagggctcaacgttagtgaagtgtggacaggtgtgctctgtttaagaaaaacagaaacatcaaaaggtaattattgccatcacataccaatgactgcatttacctaaaagtagcattaaattatgagctttcttcttttatattaaatgtttacaaacagtatcttcttggcagtagggtttgagagcaacgactcttaaagccaaaatgttggagctgctgctggatgaaaaccaatctgaaatttagattaaatagggctgtaatcgtaatgtgagtcaagaggaaaatccgtagtttctctctggaaatttcttgaggcccatcttttccgtggagtgttttaaaccttcgtatccatgttcccatccatgggcacacgggcatcttcagtgccccttagtctctctataagaatttgttacagcatattcagatgtggtaaattgtcacagaaatgaaaacttttcattttagtaaggataagtaagaaacagaggtgacaaggtttaactggagagttccagtttgggtaggtaagttaccattcatcatgatggttacaggtttcagtgatcttttttgtgacagatgtaccaacatttaattgtttttcatcaagggcggagagaaaagacacttgtgtagatttttcaattctcctccgtgtcacttggctgtcctcaccattgtctgagctcctttctcttatcctttttgctgcaatgagttgtgtcattccctcatggtcagcacttttgttgtctttgttttttgctgtacctcagaagtccatcttttctttcatctctttcccattcatgcatgagggaacagttgtgccctgttgtggggatgttccgctgggtttcaaacagtagggtttctttttattctcttctaagtagtacaatggggctgaatgtctgttgcagaatgcacacactaatatgccaggttatttggtttctaagaagtcaataaaaatactacatttaggctcagtctttggcttgattttcccctatttgcctttcaagccttccgttatgaatctgtttgtttctgattgtaaaatataatcttgcatattaaaccgaagcgtggaatcaacaaacactttgaggaaaatgttcctggcggtggagtattttcacaccaggcagggttggcagccggcaccctcccttgataagagcctggaaacagcccccagagcaattaatggcagctccgacttggagaagatgaaaaaaaaaaaaagaatggatcccaagttggtcttggcaaaactttctggtgtaagaaaccagctcctctctgcatttagagggtacagctgtgattgttttcgtgcagacttctcactcagttcttgttttggtggggagttgagcacgagcagaacgcaccgagttacacacacagacgcaaaggccattgcagcagcaaaaggctaaagacataaaaagttagagatgtcttaggacactttgttcttatattcaggaacaatcttcaaaatcctccttaatgaggtcataaaagaaaaaaatggaacaagtgttccttgtgtacctctctagggcgtgtcgttggggtcacttgccaccagtatcctatttaaaaagggattggggtagttcaatcaagcattgcattaagagagagactttgattaattccttctcttttcttttgtgctatagataatttcagtcaatttgtgatactttcttcttagccattgctgaggctgaaagttcttgatgcgtcctgctgagtattagcatttctcgggcctacttggctatggggaagaggcacgcactgcagacagctctctaagccttgacaagcagggctggcctctacacatgaccgtgatctgggatatcggtttaggaaagagcccgctctcaggttgctggcagaaaacaaatcttgatgtaaaagaagagaagaccgaacagtaagatggtgacttgctgtggtaataccgtgcggtttttttaaggttctggacctgcttcttactcagaagctcacagcttgggtaagtttcaggaactgctctcaaggggaacaaaagaaaaggaaaagtgagggctaacaatgtgagctttcactggggctgttgtgggaaagttgaagattggccccaggatggtcaggatcaggtagaaaactggattctattgtcatttgttttcttttattgaccagctttcttgtttgtggagagggcagcagagagatgaagggacattctagtactatgctgtagaaactcagtgggaaatgttaactgttttgatgttaggatatatctaaaatgcttagttaaactgagtcccatacctgttgtattttataagctcattttggaaaatgtacgtaatgtttatttattgtaaatgcaaggtctgttcggtatccgtacatttccacgccgctgaaagggtggatttggttctgatggactggaacggctcccggggaggcattgtggtgtttgcgtaaatcccctttcctttttggtttactcatttgatgcaggagggtcggttcttgggctgttgctttctctcctgttaatccagctactgcacatgcgcacgaaggcaacaggttaaaagtcctaatttaagatagctttgggtatggagagataaaatccctttttctccagttgaagcatctgtttttcagttgagtgtagatgggttgattttcatgaatgtatacatctaatatgtttatgtaaacacattaaggcaagatttcagaattaatttcagagtatgttttatgataattactgctattctgccaaaagtttaatagccaatcataagaattttcttaaattattattttcaaattaataaggtgttagacttctcatttgttctttctggtactgttttgagattaagaactcaaagatgaactcattcattcatcaaatattatttattaaactcttcctccatgccaggctcattgtcataattatcattgtaattagtctgtaacttatatttacaatgattatgtaaatagcggaaacacctaactatcctgcttcttggtaatcaggtttaactctccatggggtcggtgtgttctttctgaagcatgtctttgaatagattactcgggccttcccctagttcttggaatgctaactgaaattgtgtgattgatagatttccccagacttaaaactggagagatccatgggggcagagtggttccatggaggcagagtggtgtcatggagaggacacaggctgtcgtcatttacttttcctgccctgaaaagggaagagccagcagctcaggggtcggtgtgagacttaaactctgaataatgtaaagcggctggcacaggcctggccctcagtgcgtccccccatgagcgcccctcccccgccccttatccctaaggcagtagtgtctgtagggcctcaggcacctacattctcatttccttcatgtatgcagagggccagggaagttacctggttaccacttgctctgtgccacaaaaaaggcgtgcaaggatgtacatcagaacctggttttgactgggcacagtgactcacgcctgtaatcccatcactttgggaggctgaggcgggcagatcacctgaggtcaggagttcgagaccagcctggacaacttggtgaaaccccatctctactcaaagttcaaaaattagacaggcatggtgtcacacgcctgaaatcccaactactcgggaggctgaggcaggtgaatcacttgaacctgggaggcggaggttgcagtgagccgagataatgccactgcactccagcctgggtgacagagtaagacttcatctcaaaaaaaaaaaaaaactttgtttctgtgcacaatacctcaaagacttgttaggcctggggaatagacctgcctcatttgcttgtttgaagcctaattgcaggtatttctaatacttcctacagtggatttctctcgtcttccaaatgttgcttttccacagaattggcgtggtaattgctgagaagaaagaacttccttaactgaatcaagcctgcctccacctcttttctaggattgcaggttccttttcagataaaggtctcaaaagggcaggcagggcagaaggtcttctcataaaatccgaggattgtggtcctctgggtgcttcatctgctgcaaccaagtagaaaaaaaggaataaacacaaacacatttcactctgcctccaacaaacctccttcaggtcagatctagtatccaagaagtaacaaaaatagtccatctagcaaatgagccattttctttgagagacaggcaagcaagacacctgggtttgtctagatataattagttatttctcccgtggccagtatgggagtaaacactatgcagtaaacaccagctgaagaacattgtcctgtctatctcaggacagggaatgatagataccttttggtctctacttaaagacagtattgccgggtgcggtggctcatgcatgtagtcccagtactttgagaggccgaggtgggcggatcacttgaggccaggagtttcagaccagcctggccaacatggtgaaatcctgtctctactaaaaatacaaaaattagccaggcatggcggtgggcttctgtaatcccagctgctcaagagactgaggcaggagaattgcttgaacctgggaggcagaggttgcagtgagcagagatcatgccactgcatgtcagcctgggcaacagagcaaaactgtctcaaaaaataaaaatatagacaatattagtattaatattacagatcccattatatttcttttcatgagttttgtgagggtattccccaaagctctgtgttttggtgggggggattacaggtgtgagccaccatactggccccctcccccaataaatataaactgggtacttattaatacttaatatacatatgtttcttttcttttcttttttttttttttttgagatggagtctcactcttttgcccaggctggagtgcagtggcacgatttcggctcactgcaacctccgtctcctgggttcaagcgattatcctgcctcagcctcccgagtagcagagactacgggtgtgtgccaccacatccggctaattttttgtatttttagtagagatggggtttcactgtgttagccaggatgttctcgatctcctgacctcatgatccgcctccctcggcctcccagagtgctgggattacaggtatgagccaacttctttttttttttttctttttaatagagacagggtctcactgtgttacccaggctgaagtgcagtggtgcaatcacgcctcactgcagcctcaacctccagggctcaagcagtcctcgcacgtagctgggaccacagttgtgcaccaccatgcctggctactgtgtgcttttttgttttgttttgttttgtttttgtagagatggagtctcattatgttgcccaggctggtctcaaactcctgggctcaaagaagcctcccacctcagcctcccaaagttctgggattagaggcatgagccaccatgcccagccccaccccagtaaatataaactgggtccttccttaataccttaaagacagcaattttcgacatattcaagacagttgttccttctgctttggaatgctgagagcttctttcctcataattgtgttctagaagttctgcagggccttgctatgggaaccagagaaagcagaatggccagggccatccaattgtctccttcccagagatcaggatgaagggctgtgttaaaagatctctctcatcttcagctggaaacaaatagtactgaaaagaatgatctggactgtttctcttgtcttttaaaagtgtgaggcctaaagaggggagagagtatctttgtgctgtgttatgcctgacacattgtcggtgaccaacagatgtacttggccatttatatggggataacatacatgtgatcttagccaaaaggccctccaaaccttccttcagcagccctttagattgggctcctttgtcagtcatctgcttgagtatcagctatgctgaaggaaaagacatagggaatggtggttggaggtggtggcagccagagataaatgtatctctgaggcatggtttcatctggtcagtaagatgtgtgcctttggatctgcttcgggctaaatatcttaggggtttggtgggctttagaagtgtgtgtaaatgggaggcgggaaagtgaggccggagactcatcatcactgctctccaccctccagaggggactgcggaaagcgcagccagccatcggcctgttgacaaggcactggcagtcactgaaaaattcttttcctttctctgtcaattagcaaatgatggtcttctactgataaagtttaggaataaaggagaaagaggaagatggaatcctggaccactttcagcctgcacttgagtattccttatgtgttctcctgactccctggtgccactaccccctgccaccgtcggccctgtggcagtggggcccttccccccgccagcctcggcaccgcttcagtgtggctggtgcctccaccaccattggtactgtgtcagcattgctggtgcacctgccaccgtcggtccctcatcagcattgcccatgcccccaccaccgtcagtccctcatcagcattgccggtgcccccctaccaccgttggtcccacatcagcgtggccggtgcctccaccaccgttggccccacgtcagcgtggccagtgctgcgacccagttgctggctggaggatggctggccactgttggagctgctgatctttccaaggccttgtcacagtggccatagatctcaaggtgcacccaggacactcaggaaaccagcctcttggttaggcagctgaggcctcacttttctgcatccatgtactcctttggtatctggatcttccttttaaactttgactaacacgtgtggcagaaccaatcaccaccacagcctgcaagtgcactgaggacctgtcaggcccaggggaggtgcagcacgctcatgggggcagcccagcactgcccaggtggctggagcgagtcacggggagagcagaaagctttgggcgtcctggctgactggcctcttagtgagaatacagaacagctcctggcagcactttcccttccagctttcctcaagacaggccatgccaggcgaagaggaagggcaaggtggctccctccgggtatggagatggggtgagcctggggacagtggagcctctgagcagaggactccagaggctcagggagcagcagagccgcccaagatgatagacaggagctgaaggccagaggggaccacgcctggagtcttggcgggaggagcatggacacaggaccagggagggagccccagaggcagtgccgaccatcctgctaaacacacggaacggcctccccattctttcccctaaagagtaggggcttgggccaggcacggtggctcacgcctgtaatcctagcactttgggaggccgaggcaggtggatcacctgaggtcaggagtttgagaccagcctggacaacatggtgaaaccccttctctactaaaaatacaaaaattagctgggcgtggtggcagatgcctgtagtcccagcaactcaggaggctgaggcaggagaatcacttgagccccgggggctgaggttgctgtgagccgagatcgtgccactgcgctccagcctgggtgacagagtgagactctgtttcaaaaaaaaaaaaaaaaaaaaaaaaggcgggggcttggagaggagaggaggggtcctggttttgttgtactttgttaatatagaccagatttcggcagattgcactgtataaagaaaaataaacatggacagaaaagttgtatggtcaaaattgaagtagcaaagccttctttaaaagttgaaattacttttgtttctttactaaagcacaaagtctagttgcagaatatatgtctatcttagcctgctttaagaaaaaaaaaaaaaagcggctgagcccaggggctcatacctgtaatcccagcactttgggaggccatggtgggaggattacttgaggccaggagtttgagatcagcctaagtaacatagcaagactctgtctctacaaaaataaataaaagactgcagctgcttatattaaaaaaaaaaaaaaggccaaagaatgcctcaaagcattgaaataaaacttactgatggtttcaccagcagaacagagacattggccactgtttaagctgtgctagatgataaagaaggccatacattagtttcaaagtcagagtagacagaggcggagggtagataggtgttagcaggatggctctcacggacgtgctggggccacatggacagtggacccctggatggggagggaggaaggaagggcctcggacatctcctgatgtgaagaatcctgtgttctcaattttaacctctttgtttctagccaagaagtaaactgaataacatactccacaccagaatggtttcacttagctttcgtatctcaggaactgggcttcagttctgcagtgagaactgtcctttaattgcttctcccctggaggctgatgtggtgacatactttggagcacagggcatacaggcatccctgcacgaacggtaccaggggcttgggatggctgcagcacattctgctggggctttgttttccttggggctatgtttgttttttctttttcccttctttcttactgtttcttttttctggatgcattatgttctttaaagactagtgattttccacaccaaattattttagaaatttcagcattatatggcagttttttttttttttttttttttgagacagggtcttaccttgtcaccttgtcacctatactggagtgcagtggcacaaacacgattcactgcagcctcaacctccccgggcccaagccatcagtcttccacctcagcgtcccccaccaacaagtagctgggaccacaggcacatcccaccacacccggctaagttttgtatatttcgtagagatggggtctcagcatgatgcccaggctggtctcaaactcctaggctcaggcaatcctccctccttagccacttacaggtgtgagccactgtgcctggcctattttaaaggtgttttttctttctttggtttcggagagaaatcagtttcctgtgtatcttaagctgtgtggatagggggattgtgataatgggtcattattttataattttgctattttaaatgagttttaaaacctgtagccagtttctgatctcagggaacatacctattaactcaaggtgttacaaatatcttgacagcttaaaaattgagttaagatatgaaaataagatatgaaaatatgaaaatactgtgctgtaatacaagaggcattcattaccttttccctgcccatcagtctcgacaggataactttacacttgacccaaagatatttaaaaatacatccgctttctttgaaacttctgtgtcagtgtttttcatttgaatgattaacagaagcacattggtttgtaggtaaatagtaaataggtaattctacttgtttttctaatttttaaaatgctttacaaataattattaatgatactgtatgattaaggaaagggaatttgtatgaagctaatttgaaggtaattggcttttgcatttatttattcatgtatatatttaattcgcatctgttatgtgtcaagtatagtgcaggagtcagcagaaaaagtaattcctaaaatcatggctcttgaaatcagttatttgtctttgtttttcctcctcaaagattactccctgttcagtcttgttaatgtgatcagagatttatattaacttttaagatctcataatcccaataatgtaagatatagtagagatgagtagagaacagaacttaaaaaaaaaaacaaactgtaattactaggaaattgactctaccagggaaattaacagacttgtccaaaattgtccctgtagacagagagggctggtaaggctggaatgaacccgtcgtaatttgaatgcttaaaactttttccattttattgtcaaaattattgcctgaacttcctttttctcctcatttgcctatttcccttgctttttatcttgtgcaccaccagtatacaacatagtggtgtttaactacttcctgaaggcattattagtcatcaggaacaccaggtcattatcgaagtagataaatgggcattccgcccatcgactaccccttggactaatttggaaaatatggttccttccctcagaagaaacagcccatgctcctctggacacttataaaatagccatgcgcacgtctctgttccttctgaacaactggaattaatgtgtcctgcttgatgctaaactggagtttaattcacaatggcaaggacgcttcacctagaatatctgtccatgtgaaaggtggggagcagtgcagcttccatctccctgtctgttttttggtgggctttcagcttttctgtcccatgactgttagtgactgcagcgtaaccccaaatctttcaccagatgttgtctcaccatcttaaggaaagaagaaagttctaatggatgttttgaatgtgctcgacttttattttgttcagacccaaactgaatgaggcagaggttaaaatcttttcttgttccatctgagtaagcacgaaaacctatgatccttaatcttttagaagaaaaataacccttctctgttagtgggatttctgattcatttcttctgccctgctcccctgctctgcatttttttagtcaaatactgtctggacttttgtgagccaataacctccctcctcacctcattcccctctcttcccctcccctgtgatcacacaaagagcagagagccctcaaaagcctgggtttctgggttttgtattttaaagagaggatgaaatacttgctgtacttcaaaacataaaaccgatctgttaaaactttcccaaaagaaactgattggcatcagcatagggggaataagaaaagtaagagaaattgagattaaaaaaaaaaaacaaaacggaggagaatgtaacgttggccattgtaattcataccaaactgactttcctttagtgcaaactagtaggcgtggcaatgacttcaaacctcccaagttagggagccctgaaatctttctacttactgatatctctgaataataaccagggcccatacacggggctgggatttgatagtcgaggccttcagtcctaaccattttgccctgtaacttagatcaggacctatacatttatttgtccatggctacacccatagacatatattctaacgcaggggccatgaaccaaatcccatgtactgcccatttttgtacagccttctacctaagaatgagtcttccagatgaatgattcgatgatagggaacattacctttgaaccccagttaagcaaaatgctgttccccccaaaagatttccgttcttctcacaagtagaactatattactatagaagtctactataaaatatagtagaactatattactataaaatctacccagttttattttgaatttcaccagtaaaaaaatttgtggaaatttgtgttctcacttgctataccagcgcatatataacatcttcccatttgtctctcagcccgcaaagtctgcagtatttactatctggccctttcagtcagaagtttgctgagtgctgctctaagctgtcacaaatagagatgattttgaagggaaaaaaagatattctcactatcattctttgtctttgcctgaatctctgttttagctttttgttgttgttgtttgtttgcttgtttgtttttagaggcagagtctcgctgtgtcacctaaactgaagtgcagtggtgtgatcatagctcactgcagactcaaactcctgggctcaagccatcctcccgcctcagcctcctgagcagttaggaccacaggcgggcaccattgcacccagctaatttttaaatttttttgtagagatgagatctttgctatattacccaggctggtcttgaactcctggactcaagtaatcctcccacctcagcctcccaaagtgctgggattataggtgtgagccaccacacccagcatttttttttttttaagagtgaagtttctctggttaatgtgaatgtgagttaataggctctggcttgtgcagtgcagtgccctgagaaaactgatattaattgtacagttgtgaaatgtggtataatattgtcaatagcagcttgtttaaaaaatttagattgcaaaataaaataaacctgtgtttccatatataaaacaggcagcaataatagtacctacttcaaaggactgtccaaaggattaagtgagataatgtaaataagggatttaataaatgttaaagagaaaaaaatctaccattgagaatatgtttgtttgcacaagacttggtacctttatcttagcatactgtatcttagacagatacagtatccctaatacactgtagatacctaaatcatgcttctcatcgatttcagttaatacaaaatatagtcctatatctcttttcaacacaattctgattttaaaggaagggtcttcttaaaggaagaccattgtttgtttgaaacagaattactatatcctatacgtttcttttcttttttttttttttttttttttttgagctggaatctcgctctgtcatccaggctggagtgcagtagcgcaatcttggctcactgcaacctctgcctcccgagttcaagcgattctcctgcctcagcctcctaagcagttgggattacaggcacccgccaccacgcccagctaatttttgtatttttagtagagatggggtttcaccatgttggccagggtggtctcaaactcctgggtgatgtggccgcctcagcctcccaaagtgtggggattacagtatgagccaccgcacccggccatcctatatatttctaagataaaattttaaagtataagtaaatctcattggagagcaaaagatgaggttttttttttggttcagaaaattttaggataatggaggtcagtgttttgctaaccatctgtaacaaactgcagcattggaaagggacactgtcttggtattttgaagagctaatatttatgcctgggaatcctctacctgcatgaaatcggcaggtaagagttagaaatatgcatgacattttcaaggaaaaaaaaaatctgtggtgccacttgaggagatgaaatctatggtcctgcctgttttcctcactctgtggctcccagaatgcatctttgactctggagtttgtccttctccctccacggccagatttcactgtcactcctctgagaaccctctccactgccctcttatgctgaatgagcccctccccaccaggcttcaggccattggtttctaccagtgttcacattttttgtctgttgccttcgctggacctcaacttcccccaaggctgaattttgtcctcattttcatattgccagaccctggcttaggtgcccagtatctatttgttgaatcaatgaaatactgactaaaaattgtctaacactaaaataaaatgaaagccaaaaaaaaccctttagatttttctttcttttttagatatagacaatatacatagataatcataacattattttagtgctgattaaaaattcacagataagcccaaatttatatatagcttgtctgagggttaagttctgaagaatatggggggcatcagagagttgatacaaatccatctttattttctgcagggccagctccttagcccagcagcagctccccggtccccctgtaagtgtgtttcctagatgtggcaaaatgcctgccatggtgttccaggcccaagtgtctagctcatggaggtcagaggggaaggggcaagtgtcttctcagccacagtcgctgttatcaattgggcttcctgtgcacgaggtgcttcgtcaagggttttacatgtatcttttcattgacttctcacaacaatcctattattatatccaactcctaatatgaatctgggatttaaagaggttaagtaacatgcttagggtgtcaccaactccaggtgtgctgggttccaaagcccatgctcttcactgttaggctttccttacctctcacctcctttccagggaagtggcaagatttttggagctggcgagtctggggactcatgactggttgtttctccttgaagcatagactagaggagtcatgtgcgcaagagtgttgttaatcactatgctttcccctcctgagctcaagaaaaacagaactgtcaagagttaggaattgcgtcctggtcaccaggttccttgtttgtcccatgacccagagtggagtcatcccaacagagatgtgctaggctgtaagctgaatgtgataagggaggcaaactgcaccacagtgaagtcctccaacttttagaagaggctagctactgtgcgcgtcaattttttctaacctttttttttggtggcttatatgcaattacatacgagttacatttattgagtaccacatgcaggaagtcccaggcaatgagaaatgagcttcatggtaattgagaatgaagttaaggaagaaaattttattgttaatcaagggcttaattgcctccgggacattttaaataaatgccatgcagtacttaaggagcaatgttctgtaagtgagatgcaaaaattctttaattaaaccatggtgggtattccctgattgaaatatctgcctttatcttaatatttaaaccttcgtgattcatgtaacaacttaattagggatggagtaaattaaaggctccttgaaagaaccaatcagttgtataaaattggttaaaagtatttctgggataggcttctgtgtatttgtactgatcagaacatatctttggttcattttatgtttagctgtcatctcgagtaagctgtatttcagcctgtaggggacagatggtggctatggcattgtatagggcagacagttattagaatttgtctgagaaatggatcaaatgtaagggtttcttggccactgagaaaggagacatttccccagatgatgacttggatggtacctgcaattaaccaggtaggaggctgccaagtctgttcgttggtcagtcagtcaacacacctgagtgcagccacggaaaaggccttgtgctcaatggtgataagcttgtgtcagtgtcaaactaaacagacccagagattcaaggggacttgccagcctctgattgtacatggtaaaaaacaaaatggaaaccccgaaaacttaggtattcaaatgtttagactttactagatcactcagtttatgagtggcagagatgcctggtgtggagctcgataaattcttgtgaaaagaaggaaggaaatgagaatgggggcagttgcctgggaggagggagggggacaaggcttgcatctgtcactgtactgcacagcgttccctgactagttggacactcagctgtgactctcgtgctgttaacagacattgtcatgaggattcaaaaagtgcagggaatacacatcagtggctctttaaaaattcagggttggtgtgttttgccaagctaacattgtgatttcatttaatccttaaaaagagtaaaattgttctcagaagataccaaaatcttaaaacataggatcatgtctgtttttaaaaatttatttagctcaaataagcagccaataacaagatgaaatagtcatctaataatggtgttttataaatggttttatttggaaatttttttctcctaatttcagtgttcgtaatatgaaacagtcaagccctttaaaagggattgcattttcaaataaacacacttagacacaccgtgtgaacttagtacttgaggaaaggaaatgaggggaggaaaggaaaatattttaagtcatattttcatgaaggactctgtggtattcaacacgtgttggcagactctggccaggctcaaaaatgatgggtcgcgttctgcctactgttttaggaccacactggccagggtgtcccccaaggtgcctttctgcctctggaatccctgttacgggcccacggaaagcctgtggatgcccaccagctgctgaggggtccctgtgatggtttagatctgaaatcatactcagttctttggccatgttctggaaggctagaattgttatgtcactgtgagtatggaaatccctttagtattctacatgataattcagagcaattaattccattctaatttccatgccctagaagaactgtacttgtggccgggcatggtggctcacgccggtaatcccagcactttaggaggccgaggtgggtggatcacctgaggtcgggagttccaagaccagcctaaccaacatggtgaaactccatctctattaaaaatacaaaattagctgagcatggtggtgcatacctgtaatcctagctacttgggaggctgaggcagaattgcttgaacccgggaggcggaggttgcagtgagtcaagatcgtaccattgcactccggcctgggcaagaaaagcgaaactccatcttgaggaaaaaaaaacaaaaaaacaaaaaaactgtatttgtaaaaacctgaacaaagactatcatatctgcacaaagtctgtgaagaaaggaaaatgagccatgtgtactccagagcaactagctgcttcccagtggccataaatatgtcttgtttctcaaccatttccaaatgcttcaaacttaaagaaatttgtacgtgcccaggaacgctctatcttcgccttctctggcattagttctatgattctttaatgttgtgggagatatttatgaaatcatttcctctgactttagtgactctgcctttgagagctcaatggtaaatacacaatcagcatgtgtgctaagaggctcgaaagtctcatgacaaatgctgtcctgtaccttgcagggcaatgatgtctgtaagcatctttccttaagcacccactcactcgctggcttggatacagtgagtctcaagacatcttaagaaaattgccatctgagcatcacgctgcaggatctggtgttagatatttttgtggctacgtgggttcttactcatttcccctctccgtctgtcttgtattttctatgtgccggtcttgccttagttcatatgcattcaggagaaggtatcattagcgacttgacgcccatattatgacttaacgagctggaaagtccacacgtatagattctgcatctctcaaactgagatttttgattcgtagacaggtcgcccgtagactcttcccagaggctttggctgcttgggacacagattgtaatcacagtaattagcactgaattttcaagtcctgctctccagcttgacctggcagcatttaacggcgtgcacacagctggatcaatggcaggaattgaaggacccagttgtggggctgctcctggcagcctgtgatgggcaccgtccctggagaattccaggaaagcatcagggacaagggatggtgcagggacctgggtgcgaaagtaaagaaatatgatatttataaagcacctgtcgatgggaatcctgttcaaaattgttactggagacaaattgaagtacagacttctgcctgaaattcattatcaatgaattcatttttctccttcttgcttagttcagttttgggtatttctaaaatgttctttgttaaagtttacacttcctttccctaaaagaagtacttacagataggaatcttaaagctagtgggaaagaactgtaggacacaaaacagatacttcagtggcacaaatggggcaaagaagcacccatgcctgttatgaagtaaattctctaggaagtttggtggtgttggggagtcagggacttaagctcagataagccagaaggcactcctctgtcacccacttcttcatagtcccagggagtgtgtcaccttaccaggccactagaaggagagagtgacaagaacatggcagtttggcacggcagaccccaaccttcatccatcgagggcttgtgattttgtggggatacttgaaggctgactgctgaataaaaggtttaaacttacaggaaatacctctcaacacaaaaccatttgagcatatgtatcttttttttggggggtgggggtcgggggacggagtcccactccgccgcccagacaagagtgcagtggcatgatctcagctcactgcactctagtccgcgttcaagtatttgtagtagagacggggttttgccatgttgcccaggctggtcttgaactcctgacctcaggtgatccacctgccttggcctcccaaagtgctgggattataggcatgagccaccgtgcccagccaagcatatgtagtgtctctaaccatatgatcaatctagttgaaaaagcatggtaggcagagttttacaatgagagcttttttttaatgtttagtttccttagggacagaaacattattgttccattctaccattctgcatcagtagttcgtatgaggttgtacttttgcctttgtcacttgtcagcatttgcactgacttaagttgttagaatatttatgtggaaaatgagggcaattctgtgtgtaaatatctcacttgacaatcattttatgatttgaatgttcacttgcaatgagaccctgacatgttcacacgtgctagttttcagctgcaattacatttgccactaatttgtaccttggaacgtgtttactgaagccgctatggagcactcggttccgggagccctttcactcatcaactgcttctaggtcgcaccttgcactgggagaaacctggtgtctttctggaaaattccttaccattcaacagcttacccagtcatgcatttagcactttttcctgaaattctttcataaataagcaggaagccttctttgctatttttattataaaaggggaaatgaggataaaagttacacatgttgttattttaacatctagtcttgtatttgttgaagagttacgcttttacttaaaaacaaaaccagagacttatgcctgttgccagcctctgtcaatgatggctcttcattcttttaaagttcacagcagaaaacactgtgttaagctcttcttggctttaaaagccaaattagacacccaaaagtctcagcactttaaaatcctttaaaagatgatttaagtaaatcactttagaaatctatgcccaaacttttaaaaagtacttttcacatcttgcctttacaagtaactgtggaattagacacaccataaatgtactctgtattttcttaataagtttgaattttcggaaagcctttatttttatattatagagccaacacggctgttggatgttgaagagacccagccaatattattacacatttctttcttaagtgcagaacttggattgggacagggactgtttggtttggaaaacatcatctgttttccttctcctcctcctttccttctgtgtttatttcatttggtggctgcaagttgcaggtttttttccacttcacacttttgctagccctcttcttttcttctgctttacaatttgcactagaagagggtagcgggctttttgtttgggttcgggtttttttctttttctttttcttttttttttttctttgcatcttccttcctttccacagagagattgctgctgaccaaatttaaaacactacagtgtttaggatccctgcagggccattttaagtatttggagccataaagggccccaagccataactacctgaattgcttttaattacacaatatagctgcatcattttacttcagattctttttgattgatgctgcagggcaattgtaaccgcgaatgatgggattaagtgcctcttgaagtgactttagcttcttgtgggaacaaagggaaagaggagaacacttagtcccttttttgcctgagctgcctttttcttcacttgcgtataaagaaatacaattaacaaacattatccccagaggtaaattgaaatgtacatgcagacaagaaccgctcttgactgcaattagacatatatgatctaaggtattctggccattcattagtgctaattgtttgagaaacaagcccagaacaaatgattaaaatgtaggcgccataactgggattattagcatgtgtgataaaatgcacactctgtggctgtactgaggaaacgctttggaaagcagctgtgatttgaagaatggttggttcggctctgtggtgagctctcttggtgtttgctcaagacctggtggtgtttataacaaacaacttacatctttctttcttaattagtgggaatcacaatggtattttgtaatttaattgtaattacaaaattgtaataaattgtaataaattgtaattacaatattggtattttgtaatttaaaatcctatcgctttcctgcgcctttgggttgctcctgcagtctagcggtattgcggggactcgggataacctgaattcttagattttgcttctacactccactttctttttttttctcttctttcttttttttttttttttttttttttgagacggagtttcgctctgtcacccaggctggaatgcggtggcgcgatatcagctcactgcaagctccgcctcccgggttcacagcattctcctgcctcagcctcccgagtagctgggactacaggcgcccgccaccacgcccggttaattttttgtatttttagtagagacggggtttcaccgtgttagtcaggatagtctcgatctcctgacctcgtgatccacctgcctcgccctcccaaagtgctgggattacaggcgtgagccaccgcgcccagctacactccactttctttaaaatgttggaggccagggagaaccacttgaaagtttgctcccttatttgacttttgaatagttactcatcacacctacactgtagtgtgagggaaaagttctgagatatcctctggcatttggaacttctcttaccatacagagacctggcaggggtgacctagtcagacgtaaaccatctgggagctggctggtccatctgagcggccagcagtctgcagggttcttatgactgaagggactggttttgggatgtgccaccccagacctaaaatcgctaagccctctaggacctgtacaagtggagaacgcctaatccaagttaagtgaccaaaggagtaagcaccaattcagagagatagatggcgattaaatttcctatggaaatgcatttaggagctgggacctagcactcagtgagagagatgggaggtacccagggcaagggaaagagaagatatgagatgaaagaggaacaaaggagcaatagagggctcaatggggagtgtgctgagcaggcagaagctgcatcccaggtagtaggtctgtctgctactgggtgcttcagggctccctatttggagctcagtgtttctctgtcctccacctgcattgctgcatctggagtcacaggcaggaccatttggagattgtccatttggtgccatgaaaacctgcaacaacctttcaatctcaagtgagaccacttgagattgtcacccaacatacttccccagccacctatcccttagcatgtcattagcacattccaagggaagacaaatatcagcgttagctagagaggatataagattaaatttgcttttaaagtcagctaccaaattcaaaagacaagcacaaaagattttctggttctctccatctctaactgacctattctgtctttcttgccattgttacagaaaatggaattaagtcacaaataaaccataacatagattattatagacatacagctcttaattttcagttttattctttttgtatttacaagaaaagtgttactctctgaatttgaccagttagttccactggaaactaagtaactgtgtatattccataagagtgggtttggcagggagctgaaaataaaggggaaagaaactgttttgcactttaaactggggcattgctgtgtggtactgaattaagaaaaaaaaatattaagctcccttaaaattagaggaagttctaggaagtcttaccttaaatagatatttaaaggaattagtgcttatagcacattaaacatacttcaaaaacaaaacccaactatgttagaaaagccttcacgatcacatccatatgtttagttttaatttgcatcacacttagctctgaataattaagaaggaaaaaacaatcttaatcttatcatgggtcctatacaatcaaagccacatacacgtgattcgtgatcacagcttgtattcacagctttcgtgtgtgtggtatgggtctggcaattagactcagactgtgtttttttctaaaaattattcagtgctagagagtgatcaatattaaactctcccaaaaatgtacaaatcagaataatcaagggactgtggctaaatagaaaaaaaaaaagtcaaaattctaagctatgtaacattttggcctcatttcattgagattgacacttgaaaggaatttttgagagaatctaggatgaaaacggagatttcattaacccaggtcattttcatgacagttaccaaaaaaaaaaatttttttcagatgtgggaagaactattttctcaaaattgcagagccattttctagaagaaaaaaaaaatgctcttccatgattactttcatatcaaagtacccagtcttgggggagatgcattaatttgacacgtttagcagcctttgagcttttgaaaaactctgtaaaagaatccatggttacatctgtcaggttgacagtctttcgtgacctttaaaaaaaagttaaggagaaactgatctttttagttcacatttgctcagttacctctaactgaacaagctaggaaatagtcatttcagctttaaatactatttttttttttttttttttacatagaatcaccagtactaatggaatctctaaatggaagagtttagtggatatttctggtggtctcatggtaatgatatgtcctgtgctcttcactggctatttcaatacattagctactaaatattgtcttttctgcacctgtttttagaatcagatctccttaggaagatcaacagtgggcattctaactaggggcctctgctttgaatgttcctcattggccagtaagggaacaagtttcttctttgttccttacacacagagttccaggatccaaaattattaatgatctctacagaggcaaagagaactcaggctggcgtgtcctttctgttttaattacaatttaccaaatcctcccatgtcatgcacttgacaggtgctatacctcatagttcccaatgctgggattacacttggaaatccatctatcaaatctctttgggtagagtcctgagcagtcattcttggaccaagttctcagcgacattaacagttaactattaatgaacaacatcctttgactcctttgtgtttccaggagcccctgctagaagcagcccagaaacagaagagatgctaatcgcattgtgtgcctgaacgtgttcagtgaaggagcgcaggtttccctcttgacctcggagtcacggcaggaaaaaaaatccctccagttttccgtcagataaaacctctgctcctccttctctcaccaaaagtagagccagaaagtgggattaaggcaaatacccactaacaggcacatgcgccattgtcattccctcttccacacaaaacaaggagctttgcagaaaaacaaaaagctcctctcctctcccccccgccccacccccatgctccctttcttttcctcctcccctcctccttcgttcctaccctcccactttcttatccaccccggctttccctcagctgccccccttctcctttttctggttttctctctcacctgctctcaaatgccctctcccccgccttcctcttcctccttgcctcctgccgctctgatttaggccaactctttcctcatcctcatcctcctttcagaaaagcgtcagtgtttaccctcaaaggagctaccgggtgcccatgtgctgtgaggtggagccactccgggagctgccacggccacatttatagaaagatgaacccacacgggagacaaacggggctctctctgttttcatggaaaaactgcccttttatttgggattcatgaatggtcaccacagtggtatgggtcttcctgttcctgggacttcgctgacataagccatgcacctgcctggacaactagggctgtgtggcctcacaaggcagattcagtgagtgacaacaaagtgctaacagacagtagcttctggtccgtgtttgtacagcctaccttaggaggccttccttagcgagggccagcgtgtggtggactcaatatttgttgaatgtgtgttttatcctgaatctgatcaatacgtttttgtttatgaaatgatagcatggatgtgataaggccaatagatggggtaattttatttttttaattgtggtaaaatatacataacataaaatgttaaccattttcaagcatgcagtgcagtggcgttaaatagtacattatgattattgtgcgaccatccccaccacccatctccagaatttttcatcttcccgaactgaaactatacccattagacaaaaactccaattctctgctggccgcagtggctcatgcctgtaatcccagcactttgggaggcccaggtgggcacttgaggtcagaagttcgagaccagcgtggccaacatggcaaaaccccaactctactaaaaatacaaaaattagccaggcatggtggtgagtgcctgtattcccagctacttgggaggctgaggtgggagaatctcttgaacctgagaggcagaggttgcagtgagccaagattgtgccactgcactgcagcctgggtgacagagcaagactctgtctcaaaaacaaaaactccaattctcccctggcaactatcactctagttttgtgttttttttttttttttttttttttttttgagatggagtctcactctgtcgcccaggttggagtgctgtggcacgatctcggctcactgcaacctccgcctccccggttcaagcgattctcctgcctcagcctcctgagtagctgggattacaggcacctgccactacacccagctaactttttgtatttttagtagagatggggtttcaccatgttggccaagctgatctcgaactcctgacctcatgattcacccggcttggcctctcaaagtgctggaattacaggcatgagccaccgcgcacggcctctagtttctatctgtatgaatttgatgactgtaggcacctcatggaagtgagaatcgtagaatgtctgtcctattgtgtctggcttatttcattcagcataatgaagaactttaatttttgacatggatgcttgtttgctctctcattctgtgtgaaaaaagacttccaggcaggtcgcctgtaatcccaacactttgggaggccaaggtgtgcggatcacctgaggtcaggagttcgagaccagcctggaccacatggtgaaaccccacctctactaaaaatacaaaaattagccagtgtggtgtctggtgcacctgtagtcccagctacttgagaggctaaggtatgagaattacttgaaccctggaagtggaggttgcactgagccaagatcacaccactgcactgcagcctgggcgacaaagcgagactctgtctcaaaaaaaaaaaaagaaaagaaaagaaaaaagacttccgtcattgggacacttgtaggaacgtccctcgcccctggtgtcccgatggtctgaggaggcagtacgctgcagtgagacagtataacgcaaactttactaaaccggacaagaataaggattctgcttttttcttgactcttgccaagcctgtcctttatctgatgtccaacccttttcatgggtttccatgacaaatagagtggccagggtagaccaggagggccgttccttcccggtgcccctgctttgtaccaggaaccccacaatagccagaaggctggcctaggagttgcccccatcctgtaccctgagtccttccttagaagcaaagccatggtggaccacaaactggcttcccttgtgtatctgctttgggcacaaaagaccatgtcttcatttcagcacaaaacagtgcacttcattgaggtgtgatataattgcttcaggagagagtttgctctgaaaatgtcttctcggccttcctgaagcaggctgcacgcttatttatattggcaccacatgctaatctcacgaatggccctgttccgccagtgggaggacaaatagctgttcttttgctcccgtgtccatggaaagctcccctttctccttgcatggttgccatagtaaccaaaaaaaaatagttcttcaaaatagggaaggaatctctcagggtacttgggaacttagcaaagtgagaacataagtaggcctcaattatcatagatgctggtgtaaatacctagttattaatagtcaaagcgggttgaaattggtaggtgaattttgctgtcacttaagagagtagggaaagatgggtgaataggctcttaccttcactcagtactacagattcttctgtaaccattggaattgccagacgaggtcagacccacaggccatacaacacagaatttagtttttgttggcacagaacagagaaagaggcagtgacagagcacagttatgctcctgcgaccccctcagccccctcaaaggattggagatacagcgctaagtagaggaatccattacgaatctgtcatactgctgtggatatgtgcacacttttctgtaagaaatttttattttcaacctttatcagcccttagagtcaaaatctctttaaaggagctaaagggccacagcatttttgtgtggtattctacatagaaatttactgatggccaggcgcggtggctcatgcctgtaatcccaacctttagacaggtggatcacacaaggtcaggggttcgagaccagcctggccaacatggtgaaaccccgtctctaccaaaaattaaaaaattagccaggcatggtagcaggcacctgtaatcccagctactcgggaggctgaggcagaagaatcgctggaacctgggaggcggaggttgtggtgagccgagatcgtgccactgcactccagcctgggtgaaagaaggagactctgcctcaaaaaaaaaaaaaagaaagaaatttattgatgtattatttttaaataatgccctctttttttaaaaaaaaaatcttatgtttaagaacatataagaacttacttaaatttattagaaattgtggagacaatttccaaaggatatataaaagatatatctttttttctggttgtaaaacagctcttcagtggttactggacacgggtacagcttaaaaattttaaaaatatttgaatggaaatgtacgatgatatagccactgtggaaagaaatatggcaattcctcaaacaattgaacatagaattaccagatgatccagcagtcccacttctgggtatggaattgaagcacggactccaacacgtatttgtacagccatgttcgtagcagcactattcacattagcaaagaggtggcagcatccccagtgtccattgacagatttatggatatcaggatgtggcatatccatacgatggaatattattcagccttaaaaaggaagaacattctgacatacgctataacatggttgaagcttgaagtttttttgttttttttttttagatggagtctcactctgtcacccaggctggagtgtaatggtgtgatcccggcgcactgcaatctctgcctctcgggttcaagtgattctcctgcctcagcctcccaaaaagctgggattacaggtgtctgccaccatacctggctaatgtttgcatttttagtagagacggagttttgccatgttgaccaggctgatcttgaactcctgacctcaggtggtcctcctacctcagcctcccaaagtgctgggattacaggcgtgagcccctacacctggtgaaccttgaagatattatgctgagtgaaataaaccagtcacaaaaggacaaatacagtgtgattccatctatgtgaagtatttagagtagtcaaattcatagagatggaaagtcaaatggcggttgccaagggccgaggggaggagggaatggggaattcatgtgtaatggggccagagattgagttttgcaagatgaagagttctggagatagatggtggtggtgattgcacaacggtgagaatgtactcagtgtcactgaactgtacacttgacagtggttcagatggtaaattttgcattatacatattttaccacaatacaaaaatagtagtgtttcacatggtggggagtataaaatgatagcctatagatcagctcaaggtaggaaacaacgatcttaaaatgattcatggattattgttttattgctgttcaaatcaggaagttataaaactttccccagggttcagatcgccagtccctttccacagttacctttgctcactacacacattccaactcacaacacacacaacatacaaaaccctgggcgtagacagtgcagagggccacggatgggagagcaagccaggcactctcatatgccgctggtgggagtgtaaattagcacaactccattgggaagacagtttggtgaagccgacggagagcattaaataatcacactgataacctttttagccctctgaggacagaggctaatggaaacttgtggccctttctccttgaacattccctagcctgccacccagcctagcttggagtccattctttcattcattcagcctgcatgtgccagacatggtgctgtgagctccatgtatggctttgagccaagcagaccaagtccctgcccacagggggcctgtggcacatgggctgtggagttgcacatgagtgataccagctggggctgatttttgcagaaaaggaatttctgggaggctggtggacaggctggagaataggaaaatggacagtgaccaaactaagctcctaagaacacagcccagcccaggccagggcagtctggccagggtaaaccagactgtctaccctgccccctcctgctgctgtcctcctgctgctgtccctgcgctgctgtcttccctcctgccatcctgggcacttgctgggggcacctctttccttcaccggctcccaccttctttgtgtcaccccctcatggctcaaaggccccacctgcagtatctcatgggccaagcttatgcttgtggcctctccctagctttcaaaggatgtggagaaggaccgtggggtctctgcctccacccccaccaaacaggaagggtgttcctgtctgggacagccaaaaaggaaaaattctctgaacccagtggaagacagacagtgaacaagtaaacaaagccaataattcatttcaaaaggggaaggcctgtgaagggaagggcggggttctggaggacagcatcccaggagggggcatggggaaggtcctgctgaggacagggcatgtaggctgagccttgagggatgagagggtggcagacatgctgagatccagaagagccttccagagagggaaccacttatgggatggtcccgaggtgagcaggaagatgtggtgtgtcagggaactggcagcagatacctgtaactgagggtggtaagcagaggagacggatgggccaggcagccaggagcctgccaatctgggtgagacatttggtttttaatgtgagaacactgggaagccatggaaggggctcaagcagaggagcatcatgatttgatttgtgttttttaaagtccagactggctgtggtgtggagaagggactggagagggacagaggccccaggaaccagtcgggagtaaggtggtggtgtcttgggccagggtgggaaagatacagtgcagaggtgcgtgcaaggcacagttaacgcccatgtatgttagctctccagtttgtaatgtagagtaggatgtaagtcccatcctaaaggccctggcagggagctggaatgcatggaatacctgattgatactgggtttgattagtacgtctttaaaatttattgatacatttacctacatttattaaaatgacttagaatttattgtgctgttagagttattattttagtggcaatctctttttaacttcattttgaatttaaagagtgatgttatgactttctaaagccctgaaccaagttattttctgcacttagtcaagtctggactgctacttatatgactcaaaagtattatgacattggccgggcgcggtggctcatgcctgtaatcccagcactttgggaggccgagacgggcggatcacctgaggtcaggagttcgagaccagcctggccaacatggtgaaaccccatctctacaaaaatacaaaacttagctgggcatgatggcaatgcctgtaatcccagctactcaggaggctgaggcagaagaatcgcttgaaccggggaggcagaggttgcagtgagccaagatcatgccattgcactccagcctgggcgacaagagcgaaactcggtctcaaaaaaaaaaaaaaaaaaaaaaaaaaaagtattaggacttggccgggtgtggtggctcatgcctataatctcagcactttgagaggccaaagtgggcggatcgtttgagcccaggagttcgagaccagcctggtcaacatggagaaaccccatttctacaaaaagtacaaaatttagccgggcatggtagcacgtgccagtagtatcaggtaatcactacttgggaggctgaagtgggagggtcacctgagtcagggaggtggaggttgctgtgaactgtgattgcatcactgcactctagcctgggcaacagcgtgagaccctgtctcaaaaaaaaaaaaaaaaaaaaaaagaggagagatggagtctcactctgtttcctagactggtcttgaactcctggggtcaagcaatcctctcacctcagtctccgaaatagctgggactgcaggcacacaccactatgcccagctcttctagatgatctttttttgttgttgttgtttttttttttggagacaaagtcgcgttctgtagcccaggctggagtgcagtggcatgttctcagctcactgcaacctccacctcctgggttcaagtgattctcctgcctcagcctcccaagtagctgggactacaggcgtgtgccaccatgcccagctttttttttttttttttgtattattagtagagacggggttttaccgtgttggccagactggtctcgaactcctgacctcgtgatccactcgcctcagccttccaaagtgctggaattacaggcatgagccaccccacccagcctagatgatctctttttttttttttgagacggagtctcactctgttgcccaggctgaagtgcagtggcgcaatctcgcctcactgcaagctccgcctcccaggttgacgccattctcctgcttcaaacccccgggtagctgggactacaggcacctgccaccacgcccggctaattgtttgtatttttagtagagacagggtttcaccatgttagccaggatggtctcgctctcctgacctcgtgatccgcccgcctcggcctcccagagtgctgggattacaggcgtgagccaccgcgcccggccctagatgatctcttttaagtagatactcattgttatgatttctgtcctcctcttttctgggccacagggggcccaggaggaagtgtacaaaccatgtcatggcagccttccctgtgggctccagtgaagttgctcatgtgtcttggcccttggtgactggtctctgatgccgtactaatggtcagtggacctgtgatctgttcttggggtacaggaaatgcatgaggtgtgcccagtgggtgtgatcatggccctgcagacagggcagctcctgcctcttctctccctgttgctgtctgtcacccaacaccagccagcctgttacctctgatatgggcgccctcactcctggactctgacagctcccttgcaggcacactgccaaagggtcagtcgaaacttctggattcttccatcctcagggaatggatagcatgccactgttgcccttctctgcctgagcaatctatattgctgtgtctgctcttctctgtgccccacgttgatgcagagctcccatgaagtctcccagagggtgagtgggaagttggcacaccccctcagtttggacattcccattgcctctctagtcactgtcactgtcctgcatgttcctgggatgggggagtagaccaggcagaaccttcagccctgtctcattacttgggctctccccaccgaaccgctgtcagcatctgaagggctttgtcttgcccgtgacaaggacttcacttcaaatcccccattcctttctcactctgcctcctaagaattctatgttcagacccttaagctgctggaaattataagacttcttctccactaacaaaggcacgtttattatctcactgtggacttgataccagaatctagcatgaagctcctagttcagcagggacttcctggtgttcaccccattctcacccctgcacttctacaatgatggccatggattcagtgggtggggatgtgaagcaacatgattttcaaacaagggaaacttctgctcatctcaaaattatcatttgatcagtggaaggttgtgtaattgatacctatctcccctgcctaaatgtaataggattaaattctggttactattaatgttcagcaagcccaagtcctttttgggatcggtaagacaccttagttgtacttacaacccttaatgcagagattctcatctttggctgtactttggagtctttctggtagctttgaagaagtgctgaggcctgggactcaccataagagtgatttaattggtttggaatgtggcctggtgttttagcccctaaagcaagcttgtccaacctgtggcctgtgggctacatgtggcccaggacagctttgaatgtggcccaacacaaatttgtaaactttcttaaaacattatgagatttgttgttgttgttgtttgtttgtttgtttgagctcattggctagtgttagtgtattttatgtggagccaagaccgctcttccagtgttgcccagggaagccaaaaggttagacagtcctggactaaagcttcccacatgatcataatgttcaggcaaagcagagatccttaaactagctaccagctaagtaaagaagccattcacttgggtttagaagtcatgtactaaattgtatcttcaaatggacatgcgcttctttgattactattgctattttgaattactgcagtttgaatgttattttattattttttttcagacagggtttcactctgtcacccaggctggagtgcagtgacgtgatcatggcccactgcagccttgacccccaggctcaggcggtcctctcacctcagcctcaggagtagtggggaccataagcttgcaccaccacaccggccaattatttaaaacatgtttgatagagacagggcctccatgtgttgcccaggctggttttgaactcctgggctcaagtgatccttctgccttgacttcccaaagtgctggcattacaggcgtgagccaccatacccggccaagtgttatatatttttttaatcaaaatacttttctttaaatatagatttttttcaagtttgtggaaacctgattgagtttcattgctttcacagcatctacttgtacataatggtagcatttgactcagttagaaatttttactgaggcaaaatttcttgcattaagacagtggctatattggcattcgctagtgcagctgccctccagctcagctgcgcattagaatcaccttggccacttttattttatttttatttatttatttatttcgagatggagtttcgctgttgttgctcaggctggagtgcagtggcatgatctcggctcactgcaacttccgcctcttgggttcaagtgattctcctgccttggctgccattgtagctgggattacaggcaccggccacactatgcctggctaattttttgtatttttagtagagtcagggtttcaccatgttggccaggcaggtctcaaactcctgacctcaggtgatccacccgcctcggcctcccaaagtgttgggattataggcgtgaaccactgcgcctggccaccttggcaacttttaaacgttccatagcctaggttttatcccagaccaattatgtcaaactgtctgtggctgggactctgccatcagcatatttgaaaattccccaggggactgcaacgtgccaccaagtttgaaaatgaataacctggagacatttatgtgatatgtatcacctggaaatcttgtctatacgcagattctctgatgaagaaggactgggatgggctccaaatcctgcatttctaactagctctcacatgacagcaataagagagcaatggtgctgacctgcagcaacagctcacttaagtggcaaggacctagaaagcttaaaaagcctgggtcctgttactaatgaatttaatttgatggcactgagtagggtccagaatttgacaattttgaaaagctccccaggtgactattatattgaatcccgggttgggaaccccgtcatgctacgggccagctatgcctcttgttatataaatggttaattaatggcatcaggtgaagggggaagggagacgacaaaaacaaggccaggtgggggcccccctctgggatggcatatctaaaaaaggtccctctttagagagaactcaccataaggctaccagattttttcaacgcatcttaagcccctgctttgcatattttttgaatacagttacatattgactatctagaggccctaattccaaatatgtaagataaaataaaacaagttccatcttgtcacctgctgcaattgtattcatacgctgtagacagtgctgaatacaactcaagcacagaacagattttggaacagctggggatgggggaaggagaggactcaccagcaggaagggaggagggaggcgtggtaaagccttccttctccggaacggtgactgccgtgactgggcttctgccacctgcccagtgacagcccccctccagaccacagagtctgcaacagaacctgaagccccaatcctccttatacgtttcttctttacattatttcaaacagttttgttgcctttgatcttttcccctagagcttgctcagtgctggccttgtgctgtcctgcctctgattcacaggctgttctttggggtgtccctctctgaacctctggggatgcccttttttgtgccacctcctgactgtgcttagcacagtgcagctcagggccactggatacagctgtgcagggtgtgccctagagagggcacctggtgaggggcacaagaggggctgggccagtcatgctctacactgtgctgcagcaggagctagagttgcctttctgctcttccatttgctggaaagcactaaggggcacctttttccagtttgcatgtaagtgctgccttgtgtgctagtggaggcccagagcaggtcacccattggtgcttactaagtgctcactgaatgaatgaatgcatgaacaaaataacaaaatagaggcaataaagataaataagaagctttcatagtcatttaggtcaagtttaaggaagccctaaactagaatgtaaatgtgtgatggaaagcaggggataaacagaggagcagaagcaacaggtggtggattggattaaggttcaaggatggcaaaggagagagggaataaaaattatctcctacctgtagtcaccagtaatgcttgactcttccacaagaagaacagggacagtggggtgcgggtgagttctacgcacccaagtctggagaggtggctttggtgaggcaacaagttaacaggagtgatgcacctctgatgtcaggccctgaaacaagcagtgcagagagatgtgagaccacccccaccccctcagagagctcatgctctaggtaaggataccagacacagaatttctggtgctgggctgtgtcaaccagcagcacccatgggtgacaagtgacagttaataatactatagtagctgtatctacctactacttgttttactcttcgggatgagctttcatctgtgagaagtagctgttatgttgcttctcattgaagaagacattgatgcttcctaccccatctcctgactgccagtcaaaacattaggttgaatcatataaaattaccattttgtaggtcaaaaatggtcaaatatcagcaatttcatatagttcagcttaatacattccactatttttgctgtttgagaccttttaaatgcttttattggcttaagtcaattataaaaggagatttttgattaccggttcaatctccttactagtcagactcgctatttatctaggttattcagattttctgtttcttcacagtttagtcttggaatttgtccatttcatctaggttattcaattggttggcatacaattgttcatagtactgtcttatgatcttttatttccatagaatcagtagtaatatccccatttccattgctgattttagtaatttgagtcttcttttttcttagcctactagctaaaagtttgtcagttttgttgatcttttaaaaaaatcaactcttcatttcattgattttctctgttgcttttctgttctcaacttcattatcactgctcttatatggcttttataattgcctatgcatttacctttactaagatgtttatttcttcatgtgggtccaagttactgaccagcattttttcatttcatgttttcatatacctttgggccttcatttcactctgcacctaagcatttcttgcagggcagctctactggtgacaaactcccttggctttttaaaatctgggaatgtctgaatttctccctcactttgaaggacagtttttccagacataggattcctagctgacaggtcttttccttttagcactttgaatatattggcccattgccttttggcttccaaagtttctgatgaaaaatctgctgatcatcttactgaagataccttgtatgtgatgatttgtatctctcttgctattttgaaaattctttccttttttattgataagagatatacatagtttcaggatacatgtgataatttaatacagtcatataatttgtaaagatcaaagcaccatactcaggatatctgtcactttaaatatttgtctattctttatgctagaaccatttcagttcttttcttctagctatttggaaatatacaatagattattgtaaactacagtcaccctactgatctgtttaacactaggtcttacttctttatcaaaccatatatttatacccataatcaacttctcttcatacccacttttcctctacccttctcagcctctggtaaccgttaatattttctgtctttgggggctggatgcagtggctcatgcctgtaatcccagcactttgggaggccgaggcaggcagatcacgagatcaggagatcaagaccatcctggctaacacagtgaaaccccatctctactaaaaatacaaaaaattagccgggcgtggtggcgggtgcctgtagtcccagctacttgggaggctgaggcaggagaatggcgtgaaccggggaggcggagcttgcagtgagccaagatcgtgccactccactccagcctaggcgacagagtgagacgccaactcaagaaaaaaatatatattttctatcttcacaagatttgtatttttagctcccacatatgagtgacaacatgcaatatttgtctttcagtgcttggcttatttcacttaacgtaatgacctccagtacaatccatgttgctgcaaatgacaggatttcattcttttttatggcaaattttacacacacacattcacgtaacagtttctttatgcattgatagacactttgattggttccatattttggctattatgaatagggtagcagtgaacataggagtgaacatactcattttgatatattcatttcctttcttttggatatatactgagtagtagaattgctggatcacagcacagttctctttttagtttctttgaggaacctcaatactgttctccatagtggctatactaatttacattttcatcaacagtgtacaagggttcccttttctccacatcctcaccagcactcgttactgaccatcttttggatcaaagctgtttcaactggggtgagatgatatcttattgtagttttgatttgcattcctctgatgactagtgatgttaccattttttcatatacttggccatttgtatgtcttcatttcagaaatatctgttcagaccttttgtctgtttttaaattggattttttgttttttgctgttcagttgtttgagctccttatatattctggttattaatttcttgtcagatgggtagtttctaaatattttctctcattcagcagattgtctcatcattttttttattgtttcctttgctgcgcagaagttttttttagcttgatgtaatcccatttgtcttttttgctttggttgcctgtgcttttggggtcttacacaaaaatttttggccagaccaatgtcctggagcatttccccagtgttttttttctagtagtttcaaagtttcaggtcttagatttaagtctttgatccatttttacttgatttttgtgtatggtgagagataggggtctagtttcattcttctgaatgtatttatccagctttcccagcaccactgaagagacagttctttcctcactgcatgtttgtggagactttgtcaaagatgagttgctcataaatgcgtggatttatatttgggttctccattctgttccactggtctatgtgcctgtgtctgtttttatgcgggtaccatgctgatttggttataataactttgtagtaaattttgaagtcaggtagtgtgatgcttccagctttgtttgttttgttcaggattgctttgactattcagagtctcttgtggttccatataaattttagaacatttttccttttctatgaagaatatcattggtactttgatagggattgcattgaatttgtaaactgctttaagtagtcttgtcattttaatgatattaaagctgtgaacatagattagaatatctttccattttttgatgtgtcctccaaaatttctttcattggtgttttatagttttccttgtagagagatcttttatttatttggttaaatttggttgctaggtttttaatattatttatagctattataaatagaattgctttcttgatatctttttcatattgttcactgctggtgaatataaatgctgctgatttctgtatgttgattttgtattttgcaactttactgaattagttcatcagttctaacagctgtttggtggaatctctgtttttctaagtataagatcatgttatctgtgaacaaggctaatttgacttcttcttttccagtttggataccctttatttttttctcttgcctaattgctctggtcaggatcttctagtattatattaaatacaagtggcaaaagtgggtatccctatcttgttctagatcttagaggaaagtccttaatttctccctgttcaggatgatgttagctatgggtttgtcatatatgacccctatattttgaggtatgttcttcttatatctggtttgatgagggttttgatcataaagcgatgctgaattttatcaaatgcttttttggcatccattgaaataatcatatagtctttgttcttggttctgttaatgtgatgtatcatgtttatttatttgcatatgttggatcatcctcgcatccctgggattaatctcacttgatcatggtgcatgatctttttattctttttttttttttttttttttactagacagagtcttgctcttgttgcccaggctgtagtgcagtggcacgatctcggctcactgcaacctccgcctcccgagttcaagcgattctcctgcctaagcctcccgaatagctgggattacaggcagatgccaccacgcccggctaatttttgtattttcagtagagacggagtttcatcatgttggctaggttggtctcaaactcccgacctcatgatctgcccgccttagcctcccaaagtgctgggattacaggcgtgagccaccgcacccggccgatcatggtgaatgatctttttaatgtgttgttgaagtcagttggctagtattttgatgagaatttttgcatctgtgttcatcatcttagttttccttttttcgtcatgtccttctctggttttggtatcagggtaatgctggcctcatagaattagcttgggagtattggagtattcattcctcttcaaaaaaaaaaatttttttttgagacagggtcttgccctgtcacccaggctggagtgcagcagtgcagtcacagctcggtgcagtcacagctcactgcagccttgatctgctaggctcaagggattctctgcctcagccacccaagtagctaggactacagatgtgtaccaccatgcctggctaattttttttttcttttcttttgggtagagacatggttttgccatgttgcccaggctggctcttcagtttttttgaagaatttgcgtaaaattgatatttgttatttaaatgtttggtaggatgcggcaataaagccattaggccatgtggggatttctttcatgggagactttattatggcttcagtatcactactcgttattggtttattgagttttcctatttcttcatggttcaatcttggtagatgtatatgtctaggaatttatccatttcttctaggttttccagttttgttggcatgtagttgttcatagtagtctctaatgattctttgtatttccgtggtctcaattgttatgtctcctttttcatttctaaagttatttatttgggtcttccctctttttcttttttctcggtctaaccaagggcttgtcaatttttgtatcttatctttttttattttgtgagacagcatcttaatctgttgcccaggctagagtgcagtgaaatgatcatgggtcactacaaccctgaactcgtgggctgaagcaatcctcctcctgcctcagcctcccaagtatctgggtactataggcatgcaccaccatgcctggctaattttttttttttttttaaagatggggtctcacaggtctcgctatgttgtccaggcttgccatgaactcctgcctcaggcaatcctgctgcctcgacctcccaaagtgctaaaattgtaggtgtgagccaccatgcccaacccttgtatttatatttaatttaccaatgggttttatacctttaaatgtttttcttttctttttttttttctttttgcactttagtgtttttttcttgcagattgaataactcaatatttagtgtttcttgtaagatggtggtgaattctccctgctttcatttgcctgggaaaaacatatttgaaggataactttgctgaatacaatatttttggatggcagttttttcagcactttaaaaatgtcattctgctgcttccccctggcctgtatggtgtccattgagaactgccagacacattggagtgcctttatatgttatttgctgattttctcttgctgcttttaggattctgtttgtccttgacctttgagagtctgattattatatgtcttgaggtagtcttatttgggtcaaatctgtttggtgttctctaaccttcctatacctggatatttatatctttctcaagttttggaaagttttttgtttctctttttttttgaataagctttctaccccttgcacttgctcaactccctattgaacctcaataattcttaaattttgtcttttttctttcctccctgtgtcacccaggctggaatgcagtggtgtaatcacaacttactgcagcctcaacctcctaggctcaagcaaatcctccctctcagcctcccgagtaactgggacaacaggcacgtgccacaatgccaggctaattttttgtattttttctagagacagggttttgccatgttgcgcagactggtcttaaactcctgggttcaagcaatccacccgccttggccttccaaagtacggggattacaggcatgagccactgcaccaagtcgagtctttttttttttttttttttaaagacaggttctcattctgtcccctgggctagagtgcagtggtgtgatcaaagctcactgcagtctcgaactcctgggttcaagcagtcctcccacctcagcctcctgcatggctggaactacaggcatgcaccacaatgccctgctagtgtttttattttttgtagagaggggggtctcactatgttgcccaggctagtctcgaactcctgccttcaagtgatcctcctgcttcagcctcccaaagtgctgggattacaggcatgagccaactcatttggcaaatttggtcttttgaggtaattttctgtatcttgtaggcaatctttgttgattctcattttttaaagatttttttctcctttatgtattttcaagtagcctatctttaggctcaatgattcttacctctgcttgatccattcttctttggaaagcctctaaggaattcttcagctctgcaaacatatttctccattctaagatttctgcttgatttctttttattatttcaacctctttgctaagtttatttgataaatttctgaactgcttttctgtggtatcttaaagatcactgagtttccttagaacttctattctgaattcttggttagagagcttacatatcatcctctcatttagagtgagttgctggttccttgctatgtccctttggggagatcatgattccctgtttgctgttgtttcctgttgatgtgtatgtctttgcattgaaggattattcatttaatctagtcttctctggctggcttgtttttgtattttattggatacatttgcttagaggctttttgctgctgggtcactgcctcctttttagctctaggtggagccttaaacccaggttcacctcagctcttagtaaactatcagaacgctgctcttcctgaatgggggaggtccccaggggattttcttggcagggtgggaaggctggctaggggtccatgcccaggggatctgtgggacaaacctcctatagtgtggtactgctaaacagccactctgatttggcatctccttttgctgagttacacaacagagattccagagctggggatggtagtcccacctccctgctttgcctctgtctgtcctcagggatatttctcccttcaggcacttgcgatgcttcccatggattaaggcagagcaggcctcctgccagggaacccaagatggtagagaagctgaatgtccacctcaattgcactttttccagtgtagaaaccttgagttggaggaaatgtttttgcatgcctggtgatcggcataatgtggggaatgttgttatggatgtagaaatccaattgtcttaccatctgctcagggttttttctggggtcctgggaactgtctcatcttcatatttgagttctgaggtccttctggtgataatttcagcactgtatatttgtttttatttttctgttggggaggggtgggtactaaagccagcttacttctatgccaccatttcagaactggaagtctttcacttttgaaagtttgattttagtgtgtctagatgtgggtgtctttgagttcatcttacttggagttcatttaacttcttggatgtttgtattcaagtctttcaccaaatttggagagttttcagccattatcttttcaaaatactcttgctacccttttctctctccttatccttctggaattcccacagtgtgtgtgtgtgtctgcctgatggtgtcccacaggtcctttaggctctattcacttctcttcagtcttttttctgatcctcagacttgataatttccattgtcctctcttcaagtttgctaattctttcttctgcctgccaaatctgcctttgaatccctctagtgaatttttcatttcaattattgtacttttcagttctggggtttgtggtatctttttaagttttctatctctttactggtatttccattttgttcatacgtcattatcttgatgtccttcacttcttcctttagttctttgagcatctttaagacagttgttttaaagtctttgccatcaggtctctttcagggaccgtttctgttgacttatttttcttcctttgactgggccatattttcatctttcttcatatgtcttgtgatttttttgttgttgaaaagtgaatgtttgaatctaacagtgtggtatctagaaatcagattctccccctcccctgggctcactgtttttgtttacttatttgatggttgtatactgtgtgtatgctgaggaaaatataagcctgaggtataaatgtaaggtctcctcaagtcttttctttttcttttttttttttttttttttgagcagagtcttgctctgtcacccaggctggagtgcaaacggtgctatctcagctcactgcagcctacacttcccgagttcaagcaactctcctgcctcagcctccagagtagctgggattacaggcacctgccaccacaccccgctgatttttgaatttttagtagagatggggtttcaccatgttgcctaggctggtctcaaactcctgatctcgtgatctgcccacctcagcctcccaaagtgctgggattacaggtgtgagccactgcgcccgacctcttttttttttttttttttttttttttttttttttaaagacagaatctcactgtgtcacccaggctggagtgcagtggtgcaatctcagctcactgcaacctccgcctcccaggttcaagcaattcttgtgcctcagccacccaagtagctgggattacaggcatgtgccaccacacctggctaattttttgtatttttagtagagacattgtttcaccatgttggctaggctggtatcaaactctgacctcgggtgattccccctgcctcggcctcccaaagtgctaggattacaggtgtgagctagcactcccagcttctcaggtcttttctgagcctttctctgggcatccatggtcatttctattttcccctatatatatgtgtttgtttttgaatgtcctagtctttaatgtctggcttctaaaagggaaaaaagcaaaaaattaatgggggaggtgctggccctttaaattacctggaggtcacttcagcccaagggagaggggcttgcaacattggagggacatacaataacagtggctctcagcctctttgtctgcacttctgtgattagaaccagcaatcagtgatcagagcacagatccttgatatttggagggtcagggtctttgtttctgcctaccctggctccctcaagctatgtgcaggttgctccaggaacatgggcacagctgcctaccatgtgactgagaggtgggggatgggtagctgctgctctgctaagagctgaagttgaccaaaattaactactatttaatatccaagccttccccgagaagttgcaagccttcaatagattccaagtggtttcaaaatagttacagcaggaagattttgctaatgcagttgtctgggtggggaagattgctggtgctttctactccaccatcttccccctctcttagattttcacatgtgtggttacattaaatcctgatgagcagagaatttgccccaaacatttcttggtatttttagggaaatgtatatgttgcaaattctagtctccagtgtgaatgataagtaaaatgtggttgttgctgttacatcattatgttttttccctgtttttagataaaccagatattttcaatcaatgaaaaacgatgacagatatttcaggcagtcttcaattagctggcaataatatgttttatattaaatgaaatgtttcgtaagccatgtacacttttaaaatccatctctatctcaccatacctcacatgatacagtgcttatgttgtggcaaaataagacccagactcaagttttagaattccttaaggtaaggtcggctacaagaaggaatgagggcccccacacaaacttgcaaggccccaaaagacagtgatttttcttgagatacattaagtcacaagcacactaatcatggtgaaatgttacaaccgtgcaaagtatttgatagtgttaactactgatgtccagggttttcatgaagatatagctgacatatatattttttaagatcatgctatttatctagggagagtaaaacatcagtttgccagggttttaacttttctttctttttcttttctttctttttttttttttttttgagatggagtctcgctcttgtcgcccaggcaggagtgcagtggcgcgatctcagctcactgctcactgcaacctccacctcccgggttcaagggattctcgctactcagccgcccaagtagctggaattacaggcgcccgcgactgtgcccggctgatatttgtatttttagtagagacagggtttcaccatattggccaggctggtctcgaactctttttttgtttgtttgttttttgagacggagtctcgctctgtcacccagggtagagtacagtggcgcaatcttggctcactgcaagctccgcctcccgggttcacgccattctcctgcctcagcctcccgagcagctgggactacaggcgcccgccaccacgcctggctagttttttgtatttttagtagagacggggtttcactgtgttagcgaggatattctggatctcctgacctcatgatccgcccgtctcggcctcccaaagtgctaggattacaggcgtgagccaccgcgcccggtctggtctcaaactctctacctcagatgatccaccctcctcggcctcccaaagtgttgggattacaggagtgagccactgcgcccggccgggttttaacttttcttaactggcagttattttttttgagacagagtcttgctctattgccaggctggagtgcagtggtgcgatctccgctcactgcaatctccacctcctgggttcaagcgattctcctgcctcagcctcccaagtggttgagattacaggtgtgtgccaccacacccagctaatttttgtgtttttagtagagatggtgtttcaccatgttggccaggatagtctccatctcctgacctcatgatccacccgccttggcctcccaaagtgccaggattacaggcgtaagccaccacgcggggccctttttttttttttttttttttttttttttttgaggcaaggtattgctctgttgctcaggctggagtgcagctttgcgatcacagctcattgcaacctcatcgaccttctgggcttaatcaatcctcccacctcagcctcctgagtagctgtgactacaggcatatgcactatgcctggctaatttttgctttttgagtttttttcctgatagagccgagattttgctatgttgcccaggctgatctcaaactctgggctcaagtgatctgcctgccttggcttcccaaagtattggaattagaggcgtgggccaccacacatggcctaaggcctaattggcagtcttcatgacatagaacttcatctcttatgggcagggttggcttcatggacatgtaatttgtgctcttagacatacctagtgctgatataatattcttctgttgccattgtgaagttcttaataaattataaacaaagacctctgcattttcattttcaccgggccccgcaaattgtatcgctcgtcctgattatgggagctgatttcatcttcctttaccatatcgtatgagctaaagcatggttttcacgggataaactatggaacaggcaagggtggtggtaagccaaaggagcttctggccaacactttttatttctaccagagactgaacttggtatgataggcaagggaaagaaagagcatagtttagaagcaggcaggggctactgacagctagagattctccattaataacaacagcagctgctggtactcctgctacacccacgaccatttcaagtagctaaaatatctgccaggctctggctaagtgcttcatgttcattatttcctttaacttaatcttctcaacaacctacaaattgagtattatttttatagatgaagaatccaaagttaccagtaattaagttgcctacaattatagaggcattcactgtccttcctactcacttaaaaagaaccagtctatcttgtcttgttaaaattggatgtgaatcaccaattttcaccctttaaaagatgtattggcagggcaagggccatagacttcgttagttttttttttctacttttttacttttaggtataattgtagatagtattgttgtttagtaccttttggatagatattttctttcctttttctccatagatgctatctagacagtataacaatactggaagtgttttccaagaagaaatacatacaccctcctctttgtctcagaagatgtcagtaaacagtcctatctattttttaaacctcagccaaaataacatttagttcattgattatctctgctattattgttttcttagtttttatgtgtgattgtattctaccataattttaaaagattatccagctaggcatggtggctcatgcctataatcccagcattttgggagcccaaggcagatggatcccttgagcctaggagttcaagaccagcctgggcaacatgacgaaatcccatctctacaaaaaatacaaaaaattagccaggcatggtggcacacacctgtagtcccaactactggggaggctgaggtgggaggatcacctgagcctggaggtggaggttgcagtgagccgagatcacaccactgcacttcaaactgggcgacagagcaagaccctgtctcaaaaaaataaaaataaaaaaagattatccatgtgttctattttaattttgcattaaaatatagtttttcacaagtttataaatacagaaatctcattctggactaaccccaatcacgtgtcttgcaggaaagcgtctctagcagctgatatccccagacttggatatagttcctcatcccatcacaagtacatcccccggagggcagtgctttatgtacctggaaatgatgaaaagaaaataaagaagattccatccctgaatgtagattgtgcagtgctcgactgtgaggatggagtggctgcaaacaaaaaggtaatggcatgattttagtatgagaaaaagaaaggtattgaaatttgcttctcttccgaatagtgacattgcccgctatttggaaagattctaccacactcatcttttgctgattattaacaattctttgatctgcttttatataggttctaaatgtgtatctcttttctctgagagaaaggaagaatcccaccaaaatatattttaaaatcacgaccttcagtagatgagactatgtgtatgtatagataaaaagatggacaatcaattttggccatgatgtttgccggtctaggtaaatgagtgacatcaggggtccccaatccccaggccatggaccagtacaggccacaatacaggcctgttaggaactgggccagaacccaggagatgagcagtgggtgaacaagcattatggcctaagctctgcctcctgtcagatcagcagtggcattagattctcaaggagcacgaccctgttgtgaactgcgcacgtgaaggatctaggttgcacgctccttgtaagaatctaactaatgcctgatgatctgaggtggaacagtttcatccgaaaccattgcgccgccccacctcccatggaataattaccctccacaaaacaggtccctggtgccaaaaaggttggggaccactgaattagataattctaaaattgtggtgtaagattttcagactgataaaatgcaactaggaagttctttcttcttcttaccaccaggtatactgagtaatggtcttttctcttctgggatacgtgtcaagagaataaaacatagtttttcatggataaatcaccattttctctacttaatttaagggaaatgacacatagaaccttagtggttggctgtagcttctggcttatttcctcatggcctgaccaaagagatgagccttagaaaatatccaacttgtaggccggatgaggtggctcatgcctataatcccagcactttaggaggccaagataggagcatcacttgagctcaggagtttgagaccagtctggccaacatagcaaaaccccatttctaccaaaaaaaaaaaaaaatttagccaggtgtggcggcgtgtacctgtagtcccagctactcaggaggctgaggtggtagaatcacgtgagcccgagagtttgaggctgcagtgaaccatgatcgtgccactgcactccagcttgggcaacagagtgagaccctgtctccaaaaaagttttaaaaaaacaaaataaccaatttgtaaataggtacaaaagactcttactgcgtgactgtatagtagttgctttttattttgttttgctcaactttgttttctatgtttttctaatgaacatggattcattcaatgattagttgagatatataaatcattataacaataacttacatttgcatggaacttttaaagttaaaaacatgagttcgcttgacctttatctatccaggccctagacaatgaggttgggctgggaatgggtcgtggggcgggggatgagggagctggctctctggatttatgcctacttgaaagtttcttgcgccaggtgacctgaaacaacgtggctgtactatacaattttctggattaattgctttttctggagtttctagcaaatatttgccttaattttaaagaaaaaatttaatttccagtatcttcctaatggtcaaactaaggctttccaagtatttggaaaaggattagaatgagcctgtggaatctaaaatgtctactcaacatctttggcatgtgccaaggaaaatactattaatccttctcccagagattaaagtaaataggcctttttctgaaggctgtaatatgatttcagtatgctccttcccataactcatgtagtgcactccaagattcgatgctaacttgtaattccagttctgtgtgacccagggcaattcactttacttctttgcctcaatttcttatctgtactgtagggatgacaatatcttcttttgtcagggacagggtttattatgagaaaaaagttgataaagtacctgggagtagcttgatttcctataggaaatagataaatcctgtagtaatcatgattagaggggaatttattgtagcattgtagcacagtgagccattaggtgccctgataaacttctaattatagttcttcacaaatcttgaggttgtcctccaatacccacctgagaatgttttctgccactcaaatgagttggaaatatagtctatttctgctttacatttccttattgtttatctgggttccgaagccatccttatctccatagtagtagcagctgtgctaccacttaggggaaacctgaggaggagaagggaaagaagagttaatgattgcccaccatcttgaagtacatatgtccacatcgagtctttactaggacattttcattctcctaatgcagctggacattgcaatgtgctagacatactgttttaggcatcctaagctcagagtcagctaaaatttcattaaaaaaattttttttggtcgttgtgttgcccaggctggggtgcagtggtgtcatcatagctcactgcagcctccaactcctgggctcaagcagtcctcccacctcagcttcctaagcagctgggactatacgcacctaccaccatacccagctaattgttttattttttgtagagatagggtcttgctgtgttgcccaggctgttcttgaactcttggactcacgtgatcctcctgcctcagcctcccaaagggctgggattacaggcataagccatgatgcccggccaaaattctctttttcatccatagaaacttctggaaagccaagctggtctttgtttaaaataataataacaataggccgggcacggtggctcacacctgtaatcccagcactttgggaggctgaggtgggcagatcacaaggtcaggagatcaagaccatcctggctaacatggtgaaaccccatctctactaaaaaatacaaaaaattagctgggcgtggtggcgggcgcctgcagtcccagctactcgggaggctgaggcaggagaatggtgtgaacccaggaggcagagcttgcagtgagccgagatcgtgccactgcactccagcctgggtgacagagcaagactccatctcaaaaaaaaaaaaccaaaaaacaaataataataataataataataatcttggccgggtgcagtggctcacatcagtattcccagcactctgggaggccgaggcaggcggatcacttgaggccagtagttcaagaccagcctgggcaacatggcaaaacctcatctctactaaaaatacaaaaaatcagccaggagtggtggcacacacctgtaatcccagctactcgggaatctgaggcacgagaatcacttgaacctgggaggcagaggttgtagtgagccgagattgccccactgcacttcagcctgggtgacagagcaggactctgtctcaaaaaaaaaaagttgtttttttttttttcttaaaatctctatctaggacttaattttatctgacatatttcacatcatagccctagcctgtcaaggtctttttggattttgatttcattatccaacatttatattatctgagaatttgacatgcacatcatatgaaaatttaacaagtttcagggaaattttgaagaggttggggccaagtgctgcacaagcatgccgctaaaaacttcttttccggtttattgaacagagacgtatatagtgctgacgatatgctgggcgctgtaatttgcatgacaagccattgaggtgctatgattacattcattttacaagtaaggaaattgaagcacagagatatccagttcatgcacgtttttttttttcatagatagagttttgctattgttgcccaggctggagtgcagtggtgcgatctcggctcactcactgcaatctccgcctcctgggttcaagtgattctgctgcctcagcctcccaagtagctgggattacaggtgtgtaccaccgtggctggctaattttgtgtttttaggagagatggggttttaccatgttggccagactagtctccaactcctgacctcaggtgatctgcccacctccgcctcccaaagtgctgggattacaggccaccgcacccagcccccacgcccaacccagttcgtgaattataccatgaatgtgcttattcagaaacctaactctcctaaaatccaatcttttcacgcagatattatgatattttcatcaaatgccttttcaaaatgaagatatgttcccaatctacttgtccaaaaataccttctccctcaatacctccacctaaccagcaaagtgaggtcaggtaaatgagacttgttcttgaggaaacccaagtcagtacctcattgctaccacctctttgtaaactgttggaaatacaaaaatgctgtactgagaattttctttcttccttttcttttcttttctttttttttttttgagacagagttttgctcttgttgcccaggctagagtgcaatggtgtgatctcagcttaatgcaacctccgcctctcgggttcaagagattctcctttctcagcctcccgagtagctgggattacaggcgcatgccaccacgcctggctaatttttgtaattttagtagagacggggtttcatcatattggtcaggctggtctcgaactcctgacctcaggtgatctgcccacctcagcctcccaaagtgctgggattacaggcgtgagcctgagaattttctgttacaagtgctgtattacatatattgttatttacataccttatcccatttacatatgttatcttaatccttatagcaatgttttgaaatatgtacaaggtcacattgccattaaatagcagaaccaagatttgagtctcctagaatttttgccaggaaccagcctccagctcacctgctcgtgtatgtcctaacccacgtttttcgtctttcttggaaagtgagtgccttggcttctttttatctttagtcagcttcctgttctccattatctctccaaggtaactgacaggagctctgtgttcccatctgcagactctttcagtgttctgggactgggattatcatccatttagacctaggagcttcaattcactggaaagtccagataagcctgaaacttctcaaatatctcatattctcttttctttctcaaagtcacctcttaatcatgtttcttatttgaatattattctcttgatggaggacatagagaccatttttagtgagtttatttctcagtaagaagaaatccatattaaaactcttaatttcagattatctagttagagtctggctaaactgaatcattattgcctaattcagctttcttggcattattaaaatgtcacttcattttatatctcatttttttattaatagactaattccatatttcatttgattgactctctgtgaagtatgggcttataatgaaaacaataggagtttccacaaagcagtttataagtatataataccttccagcaggctctaatcctgtcctgctaatccaatttgtgtttaagtagctccttcatgtcaaggatggcactaccagctcaccttcccaagcacggatgataaaaaagactgcctccactccctcttatctcctccttttcattgttaaatgcatgaggaggtgtggggctgtctaagccactgcttgctgggccacagtaaaaatatgccaagtaatgcaccgatttctgatgtaactccatgacactgggtgaggccaagaaagtaggcactgaggaggaagaggcatgattccatagctgccatttcagttgaatggatatttaaacaattctttaaatttatttactatttaagtatttaagtatttaaatgtaaatactaatcaatacttaaataaatactgagtacctactcaactagttgccatggcaggcaggagggagacaaaaatggtggcagatccccaacctggaggagacacaagctgttgttgagagtggcaaaaagtaaatagctatgatccaacaaaataggtctatgagaacatatttcttttttaatcatttggttctgagtggggttttttgtttttgtttttttgagaaggagtctcgctgttgtcgcccgggctggagtgcaatggtatgatctcggctcactgcaacctctgcctcctgtgttccagcaattctcctgcctcagcctcccaagtagctgggattacaggcgcctgccaccacgcccagttaatttttgtatttttagtagaaatggggtttcaccacgttggccaggctggtctcaaactcctgacctcaggtgatcctgcctcggcctcccaaagtgcagggattacaggcgcgagccaccgtgcctggccagttctgagtattttttaattgtcatttatttggtctcttgcttgaaatataacatacaaaagagtgcttcccaaagtctatgatgaagaaccagtttagttatccaatccattgtggactgatacttttgtaaaatacaatacaaatgaattgctataaaaattaaatgctggttgggtgacagcaatgtcaggtgctacagaagtttctaaactgttactctccaaggttgcacttaatcatagtggcatggtaaagtttcagggactgagactgggccacaaaccatagcttgagtagcaaggacttaaatttccaagtgtaggagagttttttgttttttgtttttttcaatttatctttttgttgctgagctctagcgtagtgacatggtgggtggttagagaaatgtgatgtgaatggtgatgattctttgaaatttgtcattctgcttcatgaccaactacattagccattttttgtaactgttccatgtgctgaagaagaaagtatattttctacttactagatgcagagttctatatattttctattagaccaagcctgttaattatgttattcaaatatacaaatctttaccgacttctatctgcttgatgtgtcaaaaattgagagagtctagttgaaatctattctccaatagaaaatttgccaatgtctttaggtatatacacatttagaattactacatattcctggcatattgattcatctatttctatgtactgaccatctttatcccttataatgcattttgcttgaatgtttatgtggtctgatcgtaatacagcaacatcaactttccttaggttggcatttgctcagtgtaacattttcatccttttgctttcaaagtgtccatatctttgtattttaattacgtctcctatttttaaaaaatttctatatccatgttgacaatttcactcttttttttgagatggagtctcgctctgtcacccaggctggagtgcagtggcatgatctcggctcactgcaagctctgcctcctgggttcacgccattctgctgcctcggcctcccgagtagctgagactacaggcgcctgccaccacacctggctaattttttgtgtgtttatagcagagatggggtttcaccatgttgatggtccggatctcctgacctcatgatctgcccgtctcggcctcccaaagtgctgggattacaggcatgagccaccatgcccagccgacaatttctcttttaactagaatgttaatccattgtcttttttttttttttttttgaaacgtagtctcactatgttgcacaggctgtagtgcaatggcacgatcttggctcactgcaacctctgcctcccaggtttaagcgattctcctgcctcagcctcccaagtagctgggaatacaggtgcctgccaccacacctggctcatttttgtattattagtagagatggggtttcaccatgttggccagtctggtctcgaactcctgacctcaggcaatccacccgcctcggcctcccaaagtgctgggattacaggcatgagccactgcacccggctaatccattgacttttaatgtaattactgacgagtttcactttaattacaccattatatttcataatgttttcccacctgtttcatgtttcttttttcatctttctttccttttaaaatatatatatatttttaaattttttattatttatttttatttatttatttatttattttgagacggagtctcgctgtgtcacgcaggctggagtgcagtggtgcgatcttggctcactgctagctccgcctcctgtgttcacgccattctcctgcctcagcctcccaagtagctgggactacaggcgcccaccaccatgcccagctaattttttctatttttagtagagatggggtttcactgtgttagccaggatggtctcaatctcctgacctcgtgatctgcccgccttggcctcccaaagtgctgggattacaggcataagccactgcacccagccaaattttttattttttgagactgagttttgctcttgttgcttgttgcccaggctggagtgcagtggcatgatctgggctcactgtaacctctgccccccgggttcaagcagttctcttgcctcagcctcctgggtagctgggattacaagtgcctgccaccacgtctggctaattttttgtctttttagtagagatgggggtttcatcatgttggccaggctgatcttgaactcctgacctcaggtgatccacccgcctcggcctcccaaagttcgaggattacaggtgtgatctaccatggctggccagtttgtttattttcttagttcattctttcctctcttagtttataagttaggactgtgtttgtaatttttattggttactcttgaaattttactaagcacgcttaacaatgcctaaaattaatccatatctttcttctggacagctcaagaaccttggaaaactttaaatccagttatttctctcgcactgtatgcgttatttttgctcaatattttagttatctctctttaatcctatacattttatattattgctatctacagtatttctttatattatcttacatattttcccactttttttttgcttatcatttgttttgtatctcagatcttcctggggtcagttttctttctcttcaggtgcaactttcagaatttccctatagcgaaagttggttgatcataaagtttacatttttgttttttttgaaaatgtctttatggcctgggtgtggtggctcacacctgtaatgccattactttggtaggccaaagcaggcagatcacctgaggtcaggagtttgagatcagcctggccaacatggtgaaaccttatctctactgaaaatataaacattagctgggcgtggtggtgcgcacctgtagtcccaccctcaggaggctaagacaggagaattgcttgaacctcagaggtggaggttgctgcgagccaagatcataccattgcactccagcctgtgtgacagaacgaggctctgtcttggggggaaaaaagtttataataaaaaaaatttcaaaggatgggtaccttgttttggaacagttgactatgttctctagagtgccatcctactgtaaaaatggatacatttcaacaaaagtccttttttttcccttggtatactgaagttttactaaaatgtgacaaagtgtggatttattactctttttctccctcccttcctcccttacatttttgcttcctttttgcttggtataagttgtgtttcctatatttgtagattcatgtcttttatccattttgtaaaatttccattagcaattcacatatggcctctgtttctcctttctattctttccttcagagatgctgagtacacgtagttggaaacttcattctatcctccttctctcttaatatcttctcatattttcttcttgtttctctgtgttacattctcagttagttcttcatgtttaatttccagttttctaattctgtcttcaattgtgtctaatccgtttaacccatcctctgaggttttttgttttttggtttttgttttgctttttttttgagacgaagtcttgctctgtggctcaggctggagtgcagtggcatgatctcggctcactgtaacctccgcctcctgggttcaagcaattctcctgcctaggcctcccaagtagctgggattataagcatgcaccaccacgcccagctgatttttgtatttttagtagagatggggtttcaccatgttggccaggctggtctcaaactcctgagctcaggtgatccacttgcctcggcctcccaaagtactggaatttccggtgtgagccgccatgcctgggccatcctctgagttttttattttaattattatatttgttatatctggaagttctatttggttcttctacatatctgcttggtatattatgaatctgataaattcagtactttggggtgtaattttttttttttgagacggagtgttgctctgtcacccaggccggagtgcagtggtgcgatctcagctcactgcaagcaccgcctcctgggttcatgccattctcctgcctcagcctccagagtaggtgggactacaggcgcctgccaccactcctggctaattttttgtatttttagtttcaccttgttaacgaggatggtcttgatctcctgaccttatgatccgcccgcctcggcctcccaaagtgctgggattacaggcatgagccaccgtgcctggccataaataatttttaatctaaagaagagaaactttgattaaactttgggacacttatttactttccctcatcaacaatcatggattattatgtcatgattatgagtggcaaagtcttatatgcctcaagaaaacataacattattgagtgctatggcattctatagagaacttcaatctttggtcatagcattaagagttcttggtttcatagcctcatgagccctctttgaaataacctatctaaatcattttttgttgtttctgctgactcttacttatggcatgaacccatatgtatattttattcacatcagatctgtaatgtgccaacgttgcagcaagatttgaaggaggtacatctcacacaatagcatgagaagtcaatcatcatgcttgtgaaccacaaaaggatcatgaacccatattcattggaattaattcaatcaattcttagatcccaagagcttagagtgagaaggttttcctccaaagaaaatttgtgtttgctcctactgaaagtcaaagatattactaatgtgggagtctcaatttactctctctaaccttgcagtggtctcaaggcttagtattctgatactaggtctgatataggtatttgattccccgtgtccttatttttctttcacaaatcagaattcaacctattgctttttgttattcctctgcttctggaaaattctctctttttttttttttttttttttttgagatggactctcactttgttgctcagtctggagtgcagtggctcaatcttggctcactgccacctctacctcctgggttcaagcaattctcgtgcctcagcctcccgagtagctaggattacaggtgcccaccaccaggcccagctaatttttgtatttttagtagagacaggtttcaccatgttggccaggctggtcttaaattcctgacctcaggtgatccgcccgccttggcctcccgaagtgctgggattataggcgtaggccaccgtgcccagctgaaaattcttttacattttactgagcccaaaaatgcattaaaaagtacttttgttgaaatgtatctatttttacagtaggatagcacttcagagaacatggtcaaccattccaaaacaaggtacccatcctttgacatttttttttgattttccgagacaagagtcttactctgtcgcccaggcttggggtgcaatggtgcgatctctgctcactgcgacctccgcctctctggttcaagtgattctcctgtcctcagcctcctgagtagctgggactgcagatgtgcaccaccacacctggctaatttttgtctatttagtagagatgaggtttcaccatgttggccaggctcatctcaaactcctgacctcaagtgatccacccacgttggcctcccaaagagctgggattacagacttgagccaccccgcctggcttttttttttttttttttttttttttttttttttaaagacagggtcttgctatgtcacccaggctggaatgcagttgttcaatcattgctcactgcagcctcaacctcccaggcttaaataatcctcccacttcagcctcttgagtagctgggaccacaggtgtgtgccactgtgcctggctaatttttttatttttattttgtagagatgggggtctctctatgttgcccaggcttggttataaactttaaaacaattagtctaaaattcattcttacacattatttaaaaagccaaatagttataaagcaacccccaaccattattgtttccccctttccagagacaatcccttttacctgttctggcttattcatatgccattttcttcaatatttctaaataatacattttttttttttgagatggagtctcgctctgtcacccaggctggagtgcagtggcacaatctctgctcactgcaacatctgcctcccaggttcaagcagttctttgcctcagcctctccggtagctgggattataggcgcccagcaccacacctggctaatttttttgtatttttagtagagacagggtttcaccatcttggccaggctggtcttgaactcctgacctcgtgatctacccacctcggcctcccaaagtgctgggattacaggcgtgagccactgcgcttggcaataatacatttcttaaatttttttttttctatttcaggcatgatatattgactcctcactatggagaatgaggatttatcattcctccctctccaccttgtctctgccacgtgtgaaccttgcccatcccccagttgtcccaatacaattatattttaactttagtaaggttaatattcagtgtaaaaactatttagagctgaactatatagtaataaatgattatctttctatttctgccagacctattgttttccatggaggtggagttcataattgcctttttttttctggcttagctttccttttttttttttttttttaattatactttaagttctaggatacatgtgcacaatatgcaggtttgttacatatgtatacctgtgccatgttggtgtgctgcacccattaacttgtcatttacattaggtatatttcctaatgctttcccttccccctcccccaaccccacaacagaccctggtgtgtgatgatccccttcctgtgtccaagtgttctcattgttcagttcccacctatgagtgagaacatgcggtgtttggttttttgttcttgtgatagtttgctaagaaagatggtttccagcttcatccatgtccctacaaaggacatgaactcatccttttttatggctgcatagtattccatggtgtatatgtgccacattttcttaatccagtctgtcattgatggacatttgggttggttccaagtctttgctattgtgcatagtgccacaataaacatacgtgtacatgtgtctttgtagcagcatgatttataatcctttaggtatatacccagtaatgggatggctgggtcaaatggtatttctagttctagatgcttgaggaatcgccacactgtcttccacaatggttgaactagtttacactcccaccaacagtgtaaaagtgttcctatttctccacatcctctccagcacctgttgtttcctgactttttaatgatcgccattctaactggtgtgagatggtatctcattgtggttttgatttgcatttctctgatggccagtgatgatgagcattttttcatgtgtgtgttggctgcataaatgtcttcttttgagaattgtctgttcacatccttcacccacttgttgatggggttgtttttttcttgtaaatttgtttgagttcttggtggattctggatattagccctttgtcagatgagtagattgcaaaaattttctcccattctgtaggttgcctgttcactctgatggtagtttcttttgctgtgcagaagctctttaattagatcccatttgtcaattttggcttttgttgccattgtttttggtgttttagacatgaagtccttgcccatgcctatgtcctgaatggtatcgcctaggttttcttctagggttttttatggttttaggtctaacatttaagtctttaatccatcttgaattaatttttgtgtaaggtataaggaagggatccagtttcagctttctacatatggctagccagttttcccagaactacttattaaatagggaatcctttccccatttcttgtttttgtcaggtttgtcaaagaacagatggttgtagatgtgtggtattatttctgagggctctgttctgttccattggtctgtatctctgttttgctaccagtaccatgctgttttggttactgtagccttgtagtatagtttgaagtcaggtagcgtgatacctccagctttgttcttttggcttaggattgacttggcgatgcggattcttttttggttccatatgaactttaaagtagttttttccaattctgtgaagaaagtcattggtagcttgatggggatggcattgaatctataaattaccttgggcagtatggccattttcacgataagattcttcctatccatgagcatggaatgttcttccatttgtttgtatcctcttttatttcactgagcagtgctttgtagttctccttaaagaggtccttcacttcccttgtaagttggattcctaggtattttactctctttgtagcaattgtgaatgagagttcactcatgatttggctctctgtttgtctgttattggtgtataagaatgcttgtgatttttgcacattgattttgtatcctgagactttgctgaagttgcttatcagcttaaggagattttgggctgagacgatggagttttctaaatatacaatcatgtcatctgcaaacagggacaatttgacttcctcatttcctaattgagtaccctttatttctttctcctgcctgattgccctggccagaacttccaacactatgttgaataggagtggtgagagagggcatccctgtcttgtgccagttttcaaagggaatgcttccagtttttgcccattcagtatgatactggctgtggatttgtcataaatagctcttattattttgagatacatcccatcaatacctaatttattgagagtttttagcatgaagggctgttgaattttgtcaaaggccttttctgcatctattgagataatcatgtggtttttgtctttggttctgtttatatgctggattacctttattgatttgcatatgttgaaccagccttgcatcccagggatgaagcccacttgatcatggtggataagttttctgatgtgctgctggattcagtttgccagtattttattaaggatttttgcactgatgttcatcagggattttggtctaaagttctatttttgtgtgtgtgtctctgccaggctttggtatcaggatgatgctggcctcataaaatgagttagggaggattctctctttttctattgattggaatagcttcagaaggaatggtaccagctcctccttgtacctctggtagagtttggctgtgaatccgtctggtcctggactttttttggtttgtaagctattaattattgcctcaatttcagagcctgttattggtctattgagggattcaacttcttcctggtttagtcttgggagggtgtatgtgtccaggaatttatccgtttcttctagattttctagtttatttatgtaaagatgtttatagtattctctgatggtagtttgtatttctgtgggatcggtggtgatatcccctttatcattttttattgcgtctatttgattcttctctcttttcttattagtcttgctagcggtctatcaattttgttaatcttttcaaaaaaccagctcgtggattcattgattttttgaagggttttttgtgtctctgtcttcttcagttctgctttgatcttagctatttcttgccttctgctagcttttgagtttgtttgctcttgcttctctagttcttttaattgtgatgttagggtgtcaattttagatctttcctgctttctcttgtgggcatttagtgctataaatttccctctacacactactttaaatgtgtcccagagattctggtatgttgtatctttgttctcattggtttcaaagaacatctttatttctgccttcatttcgttatgtacccagtagtcatttaggagcaggttgttcagtttccatgtagttgagtggttttgagtgagtttcttaatcctgagttctagtttgattgcactgtagtgtgagagacagtttgttataatttctgttctttgacatttgctgaggagtgctttacttccaactatgtggtcaattttggaataagtgtgatgtggtgctgagaagaatgtatagtctgttgatttggggtggagagttctgtagatgtctattaggtccgcttgttgcagagctgagttcaattcctggatatccttgttaactttctgtctcgttgatctgtctaatgttgactgtggggtgttaaagtctcctattattattgtatgggagtctaagtctctttgtagatctctaaggacttgctttatgaatctgggtgctcctgtattgggtgcatatatatttaagatagttagtcttcttattaaattgatccctttaccattatgtaatggccttctttgtctcttttgatctttgttggtttaaagtctgttttatcaaagactaggattgcaacccctgcctttttttgttttccatttgcttggtagatcttcctccatccctttattttgagcttatgtgtgtctctgcatgtgagatgggtctcctgaatacagcacactgatgggtcttgactctttatccaatttgccagtctgtgtcttttaattggagcatttagcccatttacatttaaggttaatattgttatgtgtgaatttgatcctgtcattatgatgttagctggttattttgcctgttagttgatgcagtttcttcctagcctcaatggtctttacaatttgtcatgtttttgcagtggctggtaccggttgttcctttccatgtttagtgcttccttcaggagctcttttagggcaggcctggtggtgacagaatctctcagcatttgcctgtctgtaaaggattttatttctccttcacttagtttggaagtgaagtttggctggatgtgaaattctgggttgaaaattcttttctttaagaatgttgaatattggcccccactctattctggcttgtagagttactgctgagagatccactgttagtctgatgggtttccctttatgggtgactctggcttagttttctgtcaatacccacttcatgactaattgtctgaatctccccttcgcatgttcagaagcatccagtattctatcggttcatttcttggagaagtctctccctgaaccatccagtcccttgaagtctgggctgctggtccttcaggcagtggcacaactggaatcctgaactctcccttccccaccattctggggattcccttcacttttcccttgtgatcagtgtcctgttttctacatcctatgacttttcatttctaggtatgtttctgtgttggggtgaggcatatccgccaatggctcctgagaaacggcttccttctgaagcatagaagcaacttatatgaacataatctcattttttttctaatttggcttgtaaagagtagagatctatttggagtctaaaccaaagaattgtgatttgaggaaggcctttttttgggaatctaagttaatattctaggatgtcacttgtgggcaacttaatttgataccagcagtctgagttagtggaaagggtagagggcttggcaacagaaaactcatttaaatttcccagttttgacacttgctagccagggaatttgagtcctgtaatctcatgagcctctgtttctttaatctatcccatgaggttggtgataatgaaacacacaccacccaccacagggccagctgtgaggctcaaacagaaaagccctttgtaaactctgaaatgctacataaatagtgtcttttttaaaaaaaaaacaaacaaaaaacagcggtgtcatttttaaagagggtaaagcttagaaaatttaagagagtgagtaattagtatgtcccttaaggtatctctttaacatacaggagcataatttgatagtcaggaactttagagccgtattgcttgtgcctgtgtctggattctgataacattttgtcctaacaatgtgaccttggggaaattaattccacatctttgtacctccatttcctcttctgtaaaataagagtaaggatggtaagagtagtattccaccccacagaattagattaaaggggcctgacatttgtgaagtgctgagagctgtgcccagcacatataagtgctatgtgagcatttgataaatccataaatagccattgtcttaaccgtgctcccaaacaagtgtctgagagcatcagttcaagtctctggtgattgattgctttagaatgccaagacttactggtattgattattaccttagagtcctgactctcacagggtaatatattgggacagataggttttctctctaaatatcatggagtttgccaattttgctattttttaagcttcccccctcaatggtagacaaagaaaagactctaatgccagaaaaacgccacttttccacttaagctcctatatagatttcttaacatgagggggctggaaacagccatctgagaaagatgttacttattttttttccctccagaagccagagagaaaaataagtcattttattgaactgctaaacaatagatttttactttgcattattgtgccagatacttgagcagttctcggaagaaagggaaaaagaaaaagtccagagaaggcagcaccatctggctgaggacagttcagagcaagtgggagctgggctggaggctggacactgagcaagacccacacacagtgacccttccccaccgtgggaaacaggaatgggagggcagctgcaggtgggctgggattgtctggggagagctggccaccctcagtagagggggcaggggaagcacctggttgagtggggatcagagcagccgctctcttctcagccagctgctccacgtggcagagtactcaggacaaccaggagggccgccttgttgcagctgccttcctcggtgaaacacagaggaaggcaaatgccttctaagtggcagtcagtgctttggcaatccctccaccccacaccccaccctacgccccacccctggagtttctcaactgggccatgctctttgaatgcttctcctgccaaggcctaaaagaaggtgagtggttgtggaggcgagaacaactggaggctgtgctgtagagaagggagtgcagctatgacccccacagtgagccccttcctaagtgcctcttccccaaacagaaattcctgcaaggcctcctgtagtcacctgttagactgcagaaccggggaggcactccatttgtcagtgtgagttgctcagaaagaaacgcccaatatcattcaaagttattggcttattattagtctttattattaatttattagtactctttattattattactttaattgccatacagatggagggtcctttccacctgagcatatatattctctctactttgtgctctcatttatacttcttcttgtgcacatgtgcatacataacacacacacacacacacacacacacacacacacaaagtacgtagaccttaaagccccatttatgcttacatagacacaccgtacacatacacgaatccatttggctaacttttaaattcctcagtgctgtcacttttgttgaaataaattagtggagtggctaggtgtatacttcccacagcgagccagtgaactaatgtgcagggaatgattaaatgtatacaggggcatggggagccaactcctcttcaataggggtgtgaaattaggatgggaaggctcctctcccaggtgccttgcttttattaaaagacttaagagctcaggagatgtcttcaataggaattaggatatctgagtctttctggaacagtgtggaaagctgaactgtgcttaggaactctgcaaggtctttttgatccttaaaggttctgatataaaaacctatccaggtttttataaaagtagtaaagtgttttcagtcttttattaatctcttcatacccttaaataacctttccccttttgaacagtaattgttaaaaaataaataaaaaacaacaaaaaattttttctcattgttttattcttcaaaccaggcatcctcttaatgcaaggattcaaatatctctattagggtcataatagtcagcaatttccatttaatgagatcagcaaagtctcttttcaaagagatgcaggctttaaattgccagttatttcttttcctgcaattcctaggaatccaattaagtaagactgagtatgatctataatgtgatatatctggctacagaaagcccgggcctaggcaataaaacagatctttgagctccagctcaaaattaagattaaaaaaaaaaaaaagaaagaaaatgcagcttaaatgattcaaagctttataaatgtggaaactgcatccatttcctctaatatgaagtaagaaatagcttcgagactatggtgaaaatcattaaagttacttattccaaatatagctactaattaaaatctctccgttggaccaggaccacaggtgatttttacaaaataaatttaagaggttttggtttgctaaatctgtgactaacgaatcaaatatgtggccaggcgccgtggctcatgcctgtaatcccagcactttgggaggccgaggcaggcagatcacctgaggtcaggagttcgagatcagcctggccaacatgatgaaaccctctctgcactaaaaatacaaaaattaggtgggcatggtggcacacacctgtaatcccagcttctgggaggctgaggcaggaggatcacttgaacccaggaggtggaggttgcagtgagccaagattgcaccactgcactccagcgtggctgacaagagcaagactccatctcaagaaaaaagattcaagtgtatataaccactgccaaaataaagagaagatagtgtgaaatcatgcagagaacatgcttcatatcaaaacatagtattcttttcagtttttaaaaatttcatttgccacaatttataacagtattaaatactatattttcatttattattattattattattattattttgagatggagtcatatgctgtcacccaggctagagtgcagtggtgctgtcttggctcaccacaacctccaccgtctgagttcaaccaattctcatgcctcagcctcccgagtagttgggattacaggcatgtgccaccacacctggctaatttttgtatttttggtagaggcaggatttcaccatgttggccaggctgatctagaactcctgacctcaggtgatccatctgtcttggcctcccaaagtgctgggattataggtgtaagccaccacacccaggctaaatactatgtttttaataataaatcagtgggtgtattttaagtcataatttagtattctgatttagagacagagttcagcaataatatcatacttttgccatgtatttttaaatatatcaaagcttctcaggatggtggtagtggtggtttaaatcttattctgtaccggctatgcaggccgcatggtgttttgctgataacagaggaggaaagtgtggctcgtgaggagcaaatgtcaagtcaggaattaactcaagacacagcctgcccttctactaaaaatgtgctatttcaaatatgtttttgcaatttcctccatgtaatgcagttgtgttagccatttattggtcagaaattaacctccaaaagttaacagttgggccctgaattctcagccaagtctagtctaagaagcagcatattcttgggcaagttattgattaactccaggtaattaaaccaaaaagacttttctagggccagggatagtggctcacacctgtaatcctagcactttgggaggctgaggagggaggatcacttgaggccaggagttcaagatcagcctgggcaacatagtgagatcccacctctacaaaagaaaaaaaaattacccaggcatggtggcatgtgcttgtggtcccagttactcaggagtctgagatgggaagattgcttgagcccaggatgttgagactgcagtgggccatgatcatgccaccaaactccagcctgggtgacagagtgagaacctgtctcaaaaacacaaaaaacaaaaactctccctaaacatctgtcaaaagagctcaaaagcctagagagaaagatgagccaggtgctggccggagataaaaggccagctttgtctttggtttcccaaagactattcaagaattggagggtgaattcttggagcctccaggggtagaagaatgaaactaaggttgaacaccaataggcattctgctgagcatttcatctaagccccctgccattttgcaggggaaggctgataacctggcccaactggtgcaggtctgcagggcatggggcagggtggaatgttgtcaagagtttctctttcctagagctgtggatggataggtacacaggggaaagcaaagtagagagggccagtaagtggaaaaaaactgttccacatagtcagagcaaagggagcctgaagtaggtatgagagcccaaatttgtggtcaagacataagaggattaggaagaacagacctaggaacttctactggtcagggccatcatggctccctgtgctggcagccatgattgggctgcttcactggagacatgctgcatgccatcagccttcaactttgagggccacaggtggggtgggcactaacacatctccttcctgggtttggctggaggacagtggcctccttgaattttggcccattcctaaactgaaggcagttccccaccatagttccttccagcctctccccttcctaagagggccaggctgtggagctgaccatggtgctgaagatgatctgagattgattccagagaacatttagggagtacttcctgtgtgctagcactatttctaagtgctctgcatgggttaactcatttcatgttcatagcaattctatgaaagaggtgctattattctccccattgacagatgacagataaggaaagtggaatacagagaggttaacaaacttgcccaaggtcacacagctaataagcaaggaagccaggcagagctgcactttgatcaccacatttgctaatgaaggttattaacagagccacacaaaacctcctggattttcacttgtccaatatcatcctagcagaagtgagccaaggttccccatctcaagttgccaggcaggttgctgtggggtggcatcttggagagtcagacacagtagtgtagactggttgggtacaagcaaaagtgggcagcccacctactccatctagtcagtcaccacaccctaatgttatgacttacttcatacctgcttccctggtaggctcttggctttgtgaagagggtgccatcgtatcccccattgcttaccagggtgcccaagacatagtcatagtaggtattcagcaaatattttatgaataaatgggttacatgtgatcaatatatggtagctgttattaatttgctattatttcaacattgatagaagcaccatgttgtagaaattatagtccctttttattttatatttgtcatgccccactttgggagttatatagagttcagagtgcatcttagtctcatatagatgcatgtgtggagacagaaatgaaagaactcaagtcatgagttgaacgattttaatgcctaaatacatgtatgactgaatttttgttatatgttagatttgggatcttacagtatatttaagatttaagatcttatagtatctcaggaagatagttccactgacatgaaaataactctgaactgtctcttttagaggatgtataagcattccatgttaacagaacttgcagtggcagttagaaaatattccagtcaaatttctggttttggagctgagtttattgcctgtttgttgtttgatcttattcaaatcatgtttttgttgtgttgtattaatatataaaagatttctgtgtctgccatgttagctgtttgtgtgtgtgtgtgtgtgtgtgtgtgtgtgtttaaacaacactccacagctgagctcttggaggaccaggcctattttgacagctccccttagtccatgtatcaccaagctcattctctgccaatacgttccacgtgattttgtggacatgtgtagcacgcctgtgcaacttgcaaacacccatacattattacaataataattgggttttgatgcaactggaactcagtactaccaagctgccagcatttccttttggctaccagtactaggcaggaaaattatagcctaactgtcttcctgtttattgataaacaaagtggccagcccagcaatggagcctgattagcagtttgcaccctttgtgaaaggataaacagaaccctactgttttctgtgtttgactgcaatttgcatctttaaagaggttggactgccctgagattcatgttcaacttgagtgcctggatgttctttgatatgttacatgtcagcctccttgttttcctctccttcatcttgaaacaatatttgccagagtttctctgttcccatctggcttaccataagcttccccatagtcacctatctgaagaaggagggagggaagaggcaggagaagaaacgtctctgtttcactgcgctcaaattttacattcccagaaggccctttaatgtcatctcaattccattttttgaagagatagtaatataagaatgaagaccaaaagacaaaagagaatctgcttactgctctctttggcccatgggatcatgtttgggctcgttccccctccatcatcttcactcactcagcaaaaagtgccttccccctttgtaaagtgaaatgtggtattagtcacctacctcaagtttggtgagtgttctgttctgaaatttattctaacctaattagattcttaaactaaatggtaacagagcaaatagttggctccctctgtaattattttccagtgaaagaaatgaagatcattttaattggaatttgcatgatgtaaaagagagtattaatacatgtaaacatccattaatctgtttaaacaaactttccccttaatccttaccgtatgtaaacaacatttgttttgccttagagatattgcatgattggacccacgagactccagttatcccactgaacagttacgttttataacttcaaaagaaatgttatatatttattggaggttgtagggtgttaagtgtagttagacataaattgtacctcagctattttgttaatgccaatagggattaaattagatttttatagctgctgtagaagtctatttggtagttaacaagtgggatttttaaatcctgggaaacataatcctattataacacaggcagctgaattaacataacccaggaagggactcttcgtggattagcattttttgacaataacaaagaaaatcatcaaattgtgtggggatattacatgcttttctcaaaagtaagaacagcgaattgggaaaaggaaacgagaaatggccaaacatgctatttcttagagaccgtttctttttaagggaaagacagtggaggctgggcagtaagctgaataaatgtctgctattttctgtgaagtcagtaatgctttttcagttattattaaactcttgaatctgagaattatagagctggaaagaactttgacatttatttaatttttatagtcctattcaaatatttacttcaaacacttcagaaagatggatatatctcacatatatacatatatacacatacatataaatatatacacgtatattgcatgatatacacacattcacacacacacacacatacacacacacttaatagtatatgagtggcctttttaaagaagagcctttcttaagtcttagcaattggttttcacatgctggtgagggtgattattagagcttgcaggacttgccaattttcatttgcacgggtatcatcttagcagataatcacatgggcatcaatcactggcatattattgtgttagataattgcatgggcatcaatcatgtgtgtatctggagcaagtcatcatgtgggcttcaatttcatctatctggaggaaggtaattgtgttggaagcagggaagggtgtgtctacatggcagataatcacatggggatcaatcacatagatatcgaggtagataatcctgtgcagatccatcacatgtaccaaagtggctaattacgtggatatcaatcatgtcaacaccctggttttctggtacaggttacacgtgaagcacacatgttgtgtgcctgcttatgtgggagaacaggtcagatgtcgcgtgcacccacccaggggcctgcagcggtgtggtgtgtgaggaagctgagccattcagagcgtggccttcctccacagagcgctggaaatgccatgattagggatcctgttgggattcttttattttaaggctttggctcctgccaaaaggaaatgttcctgggaggaacatgactgcatgtagaagaacgtgcagtttgtcgtcctcccctcactggcatctatttttccctccttcagaccttgcctcccaattccttctcacccacatggtttgggtgtggcttcagccccagtggagtctggggctcagggccaaccagtcagtgcactgcattccactggccaccatgattggttcaggccagaccacatgacttcagccagtccaatcagagtgaatatcaggctttttggggagaaatttaagggagagttcatttctctctgaattttacctgaggaggtgagattggcgctgctgctgcaaccagtgcctgggagaggctgatatgtccaggccccaacaaatggagccagaaatgaagccacctacagaaatcagatctgagaggtggagagaaatcctgtcctgaggatactgcttgggcctgatttcagcagtccctgaagcaaaatccctggcctggaaaggctcacctgagccaatacaatcccttttggcttaagacataattgtttggccgggtttggtagctcacgcctgtaatcccagcactttgggaggccgaggtgggtggatcacctgaggtcaggagttcgaggcaagcctggccaacatggtgaaactccgtctctgctaaaaatacaaaaattagcctggcatggtggcgcatgcctttagtcccagctactcaagaggctgaggcaggagaatcgcgtgagcccaggaggcagaggttgcagtgagccaagattgcaccactgaactccagcctgggcggcagagtgagaccctgtctcaaattaaaaaacaacaacaacaaaaaaaaaaaacaaaaaaaaaaaaacgtaattgggtttctgcccccttgcttcagaagaccctaactgataggataaaatcatctgagtctttcctgaagaacaaagtttcataggagcagccccagtaggggaaggagcagctctgagggtgtaagtgagggcagaaggggaagctgaggcttaaataacatcaccgtcgcccttagtataggccttgagctgctcttggcaactgtcaccaggtgccccccctccacacgtccctgttggagtgccccagtctcctggcctctaagcatctgagctcaagctgtgaggaacgtttgttaaagacttttaaatgcaggcttaatgttttcccttttccccctgcctattcttattactttgatatttatcaaatacagtttgtaatattaattacacattaatgttgaagtgcagttcccatcaccaaaataaatgaaaaaataggtgtcctcatggcaagaaccatactgttccaaggcattcttttattgccatttcagtagacagttggattttttttttatcagcctgaatgtgacatctgataattattgatttggaaagagataaaagttttggaaaagaaagtaatagaaaaaaaagaattctccttgaagttaaatagactatttcttggaaaagcaaaatgggagtttatatgctttgtctaccaaattctgtgtggctaacagcttgtgccttttctccttcagtttttattcttgttaatactgtcactttctgcgtatgctaaggtttataagaaggtaatgtgacagttgatagaaacacctagtaagaaaacacggccgggtgcagtggctcacacctgtaatcccaggactttgggaggccgaggcaggcggatcacctgaggtcaggagttcgagaccagcctgaccaacatggagaagccccttctctactaaaaatacaaaattagccaggcatggtggcgcatgcctgtaatcccagctactcgggagaccgaggcaggagaatctcttgaacctgataggcggaggttgcagtgagccaagatagcaccattgcactccagcctgggcaacaagagtgaaactccatctcaaaaaacaaaaaaacaaaaaaacacacatcactgaaatttacctagaatcttttttttagtccctttgggctgctgtaacaaaacactgtagattgggtggcttaaagaacaaacatttatttcttacagttctggaggctggtacatccaagatcaaggtgctggccagttcccagtgagggctttctcttcttggtttgcaagtggctgccttctttctgtatcctcacatgaccaagaaagaaatcatccccatcacattggggattagggcttccatgtaagaatttgggggggatatatttagtccatagcaatcttaaaacctcattttaatttaataattccaaactcttttttggttattattgttaaatttcactcaaactttagacatagcagaatgtagcacatttagtttgaaattcacttattttgggggggtccagactctagttgaagttcagataaacaataggatggctaatgggaaaggggggagctataatgcttcactcattcacagacctcatttcttaagtccctctcaccagtgcagtacacaagttctcacttgctgcaggtaaatatttgtgaaatgaatgcatgtatgaatgagtgactccataaatgactggtctctggctggaaggcatccccaggactttagatgggagtgtgagagatagacagtgtattctgcactccaagctgcttgtgtggtcttccctctgcccagcatccttgggtcttgctgggaacatcttaactcatgaggccttccaggactactcagactcagttatcttcctggctgtatattctacatgtgctatatgtactttctgttctgtaacatgcatcaaacctcaaatacacgtacagcgcttaccgttcacactagactggacactctgcaggcagggattgggtgtatattgccagcacccaacactttcccagcatgtgccacttcattactcttagtggaggtgggaatggcatgattgtggtggactctcaagatctatcccacttctctgtaaccaagcaaatcggtaactcatccaaactcaagggctaagtctgactagaccaacaaggggtaattcagccctccttgccagccctgacttttcatcaccagtgacagatgtggagtggccggctgaaggtttctaggaaggttttctttcctcttaagagaaggccatggcaaatcagtctttcctttctgctaacaatgacaaaaggatgtgttgctacagtcactaaggatagcttgccctagaacaaaggcaacattgtgggttggagagtaagtagagaatgaatgggcatccttgatgacactgctcagctgctggcttcaccagcccatcgctggatgttgtcacataaatgtcgttagtgtttaattaagccagtctgaatttgggtttccaatcttccagcccaatgtatcctaactgaaaaggaactgcagtggaaagcctatgggctttggtgtccaatacattggatttgattcttcttagcagtgtgaactgacctgactttcctaatatgtgtaatggagaaagtaatacttctcacctggggttgatgtgtggaacaaagaaaatatgtatgtaaaacacttaccagagtgcctaaaacacaaccaatgttgtttcttttccatttaggagatggttcacttgttgatctggggggtccagtgggttgaattgatcaacagtgaaatcagtaaactctctggtcctttgcacatgaactgtcaggtagttcaccgtctagtatgggagtcagatagacattcgcggtcacactaacagtggggttcgactgcagtcctaactggagaacagtgtccagctaacagaggttgagagtactgatcaaaccacacctgaaggctggagtgcaggtctcgtagccatgaactagagaacaagaaacagcggaagatgctgaggatgttaatactgaagaaaggacgaccagaaaacagaaacgacttcaaagagaaaagggagtggaatcgttctgtgctgcttcagagggtggagtgaggacagaccccatcaacaaaggacgcaagctttcactcaacaggagaaataactgtctgagaattagcagtgcacaaaggcagagagcgagcacctcatcaacaaagcagctccccttcccagcagccactcatcaggaagtcctgctgcaggagtttgggccacatggcccccaagggctcttgcaaagatctggatttgacattaaactgttcagcagactcttgttgtttgggctacagcaggtggatctagagagcttctctgttggttatactgttgctgttgtttttctgaattccctccgtcttttttctgacttcctctcttgttggccactataagcaccacccaaactgacctttcacctctaactgtttttttttccatgctcccttgatgatcagagagatcctatacatgaagacagagtaatgggatttgtgcagctgcagtgcagtttttagggaagcgaaaggctccctgccctgtagtcttcctgtctcgcctgcctttatacctgaaatgttcccttttccctcatctttcaactaaggcatcacctccagaaaatacttgataaatgtcaatatagtaactggtaagttgttaatatatcacctgtgagggataccatattaatgccatatgctttttaaaaaagtgataaaatatgcagaacatacattttaccatttaaaccatttttaactgtatagttcagtggcattaagaatattcacattgttgtataatcatcaccaccagcatctccagaacttttcatcttccccagcagagactttaccattcaacaataactccccatttccccctcccgtccctggcaactcccattctgctttctgtctatatgaatttgtctactctagatacctcatagaagtggaatcatgcagtatttgtccttttgtgactggcttatttcactccgcctattgtcttcaagattcatttgtgttatagtgtgtatcaaaatgtctttcctttttgaggctggatagtattccatggcatgtatataccacattttgcttatccgcttatctgtcaatagacacttgggttctttccactttcggctgttgtaaatattgttgccatgaacatgggtgtacacgtgtctgttcgagtccctgctttaattcttttgggtatatccccagaagtgggattgctggatcatccggtagttctttgtttaattttttgaggaattgccgtactgttaatagcatatactttaaaaacctatatgttaaccaaggagaagaaaacaagttaatttgaagagagtcagaaagcgtgagtgtccagagcctactgagccctggaagtcacggataaaaacaagaagtgaagtcaacactctcggtgagaaagggagcggtactgacaaacttctaccatcccagtgtgcccggttgctcccacgccctcaggatactaaagctgggaggaaggagggggtgggggaggggactcagagggagagctactgagtgcctgcagggattatttcgaggtgcttttgcatccattaacttatttaatcatcaaaacaactcagcaggtgcccttatttttatggacaagtcttgtcaggtacttaacatttttaatttttattgcttttaaaagcaatgaagaatatctttaagagggaagaaataattctgaatccaccaagctcacacaaaattcacctcagtactgccctattttcctttgctccctttgcagccataatttttacatggttgcgttgttgtcatttcattttctactttttaaattgctacagagatctttgtatttattattttaacagatgtatagtatgcatctaatgatttcacttcaattcagttaactattcccctaccattgaatatttagattgtcttcagtttttcactataattttataattgttttataacaagattttataattttagcaataaagagtttcatgtacataacttttttcctcttatacttatttctttagaatgcatttctaggactggaattaccaaatcaatgggtacaaacatttttgtgaattttgttatacactgctgaagtgttttataaaagggatgtttcaaaagtgattttttgaagattgataatacattttcaacagcaatactggagtataccagtgtctccacattaagtattacttttaactttgttttattacttagtatatatataagtatacttaattgttgccttaattagtttttaaaattaattgcatggtttccatatgcttagtaactgtgtttcatatgtattttgtctcattacaccttttacccagttatctgttggatgaccctagaagtattgcattgtaattaagaccaaacaccagaagcaaaggtagattcagttcttacttttgttacttccttaatcttgggcaagttaatatttcattttgttaagcctcagatttctgatctttgaaatcagaaacaaccatagtacctacttcattagattatttcagaggtcaaatgaggtaatgtgtctgaaccacttcagcacaatgcctggcacatggaatatgctccgtaaagattagatatcttcactgttattatgtagagccattcgtctgatttttcctcctcttaccatattctaaatcttctgttgtattacctcttacccttgggtagttgagctgctgggagttggaagtaagggcagtggagtttgttcagggcaaggcctgccatctggttcacacatgggtgtgatctggtcagactaaacagcattttaactccagatggctgtgtctacattctcgtgttatgtggacggatgatcaacagtggacttgcaggggtggaaggatgtacagagaccctattagagctaccctagtgcttccagttagagctggtgttcacacaagattgttgaggtagggctaccccattcgcaatggtattcaaggaggaaagtagcctcctgtctccagccagttcaaccttcactgctaattcctgtggctcctgctgcagctgcaaaccacaacccactgatttctcctcagatagagcaagaaggggcagaaagtccggtccacatctattcagaacttagtagttgataggtgcgttctttatgctttctcactgagatgtgtctccccgcatgtgcatgactaagccacgaaggtctgatttgacgcagaatccactggctggtattcagttatccataaggattgagagccagcacacccatgttcctggcagcattattcactgtagccaaaaggtcgaagcaacctaggtgcccgctcacagatgaacgggcaaacaaaatgcggtgtctttgtttttaaaaaggaaagatcttctgatacatgctacaacatggatgaaccctgagaatattacgctgagtgaaataagccagtcacaaaaggacaaatcctgtataattccacttacatgaggtactagaatcatcagattcatagagaaaggagaaagacagtttccaggggccgggggggaaggaggaacggggagtgtaggaagaggaaaaatgttctggtgatggacggtggtgatggttgcacaataagataaatgtacttactgccagtgtacactctaaagggtttaaaacagtaaattttatgttaggtatgtttcaccataataaaatattttttaaaaaggaaaaagaaaaataacttgggcctaatctaggatatgaagaatatgagaagagttaaaagaattttttaaaaattagcagcaacttgtgagagaaggttcctcctcaaagcggaggaaagaattaggatagattgtagtttagacccaagaaaaccaactctgttcaaagcatatgaacctgaagttccctgtggtcatggcaaccttgggaaggttcaggatcctcttggtttttgtttttgtttttgttgttgtttgtttgtttgtttttgaaatggggtctcactctgtcacccaggcttgagtgcagtggcgcaatcacagctcactgcagcgtggaccgcctgggctcaagcaattctcctgcctcagcctcctgagtagctgggaccacaggcccacacccccactccaggctcattttttgcatttttgtagagatggagtactgctgtgttgcccagactggtctcaaactcctgggctcaggcgatcagcctgcctcggcctcccaaagtgctgaggttttaggtgtgagctactgtgtctggcctaggatcctcttgtagaggaacggtcacctgagccctttgtgctggagaagatatctggcccataagcaactttagtcaccggagataatactataatttatagacttaaaaaaaaattatagacttaaaagcagtgttgaaatatttgaggtttttcttgttagattgagcttttgaaggacaagaaaatgactgtattaaattcatgaatatagttttgaaagtttaagggaatttaataaagtcgtaaatggtgccaattgaggtttcaacttgtttagatatattcaacctgaagtaatcaattttgtttataaatagaatgataacattggaggtggaggacaaaggcctaaggcaggtgaatttttgaattggtaattttaatgaatttaatattaacttaaaaaccaaagtaacccacatgatcttttccatgttgaaaagctgccttcatacatcaaatttcacattgacagctctgatcctggtccttcctattctaaagtacagttgctgacttatttgtgggtttctcccatgagtatgtaagctccttaaggccacaagcaagttcacgtcctgagcatctagcacagctggacacacacacaagacacttgtcagatggctgggggaggtggggtgggggaaaagaaattcttgaatttaccctggtactatatgcttgttaattgtttagacacacacctcccagcttcctatgacaatttccattttgatatctatttggacatttgctaaatgaagccatccacttattttaatgaattactatatttataataaatataatttaacaaataaattatggggagtattatttattttaatcgtcctgtagaactgtattcaagagtatctacacaaggggtgttcagtccttgtttgcctgcataactctcctgaacacaaaatgttacttctgggagcctcccttctgtgcatgaccagtgtcatgtggaagaccaccctctccgatggtgggctcaaggttctatgtctgaagtccagaggcacttcatttggatggcagcatcaagatttcaagcttggtaataaatgaagagagggttcccaaagtgtcttgtgaaagttgggggaaggcattccccttctgtgagacagagctgtgtcttcctgcctggcttcctcttttggcacctttcccctcatgggggaatggatcctgaagcgaagaaagggatggctgcaggccccttggctgtcacgctgttagcgattagctgttttcagcaattatgcccttccatcgagggtgtgacggctggcgcctctggtaatgagctgccttccaaggctccctcccggccttcacttgctgctctccttagtggcctcagagtctgctgacattattgccaatgtgacatgttcctcttggccaactcgggaagacatgccagtctgccagtgagagagcctgaaggaacttcaggagagaaacatgaagctggatgaagccaccaagcagacttgtccccagggaatggggacatcagctcatccatcccgactagctcaaaacgctcaagaataacctatgcccaagttttgctggcaagtggaaatgtccattctacattagaatagcataggaggatttttttattattatcacatgggagttacattgttggtgaagtcatactagctagataaatgattaactcggtaactcatcaaataatgattgagaaaccactttgtggcaacacaaggctatcactagaggtgacagaggtggggaaagtaagtgtagctcctctcctctccgggcttatggctggtgagacagacatacatcattccagtggccactcacatcaatgtttggttgtgaactgtcctatgtgatgggaagagaaaatacaagagagtgtaaaacaggactccagggtggagagagggaatccctgtggaaatgccatttgaactaggagctgaaggatggagaggaggtaactagacaaagtgtggggtacagtggggagtggagcagagagagaggctgtgggtggagggggaggcacatgccaaagccgaggggtgacaagaagctgggcactgccaagaaactgtgagaagcgaagcttggctggagcggccagagcccagggtcatgcaggatgagcctagagaggaaggcaggggcctggtgatcctggacttggactgcagtgaggattttagatgtattctaagggtaatggaaggctactaagggtttcaagcagcagagatatgtgtcttgcaaaatagcattctgaatgcagcagaatggatttgagctgggcaggtgtggacggggaggccatcaccatggtcaatgagaagagtggagggtgatgaggaagacagaggacatcagagactgaattccctttccttccttccctccttcccctccaaacgtagccctcctgtcagctccaaaaggcagaagtgggttctttttcttagaagaccattccagttttctaagcaaaattccgttctcttctccttcctaagaaagtttacaaagaaacagaagcctacaatcccatggcagataaaaaattttaggagagccacgttccggttctgaaggagcaaagacctcttccacacacacagtggaccctgtggtgccactctaaaacccatacctccaggcccattagaacccccaaagtgacctgatttccatcaatcccaaagccagccaagcaaggttacgtttataggactccctcctggtgacagtccagaaaacaataaaaacagatgcaagtcccactgtggtacagaagcccactttggaaaccagggggtcaagtgcccattatccaggtaagcaggctctccctaggagaccaaaaatgcatgtcaacatgccaagtggagaggggctggaagccacaggggccacctgggaagggaggcctcagccaggcagtaataataaaaccggacaatgccacagagctggcgtggctcagccaggagccagggaaggatgggggtgggaggaagggcctcccttcctccaaaatcaatgtccctgttaacttgggcagaagaaaatctgacagctctggaaacctgcccatctgatgagaaggaggaagctgagaagcggctggagccagagaaagcccagaaatggcaggcgggatcagttgcccattggggacctggtggcaggagctctctgcattgcttttactgacgcccaggaggacaggtgccactgccagtccccacacgacctccagctgcctcctaaagcagcccgcccctctgatgatcctggctggatttgttttatgaaaaatccacgaaacaaacagggcactcagcttctgaacccagttccctgggggctattccattttgttatctggaatataaccgactgagaggcaactggaataactgaaatctacagagaaatacaagtcttgacaagtttcaggaaaaaccacccttcttattgataaagcaataccagccaactagtcactgatatttatttaatgcctcccatatgaagagagtagcatgaatccacaatcctgtatccactattccaaaatccaaaaagctgaaaatcaaaagttttattattaagtttgcagccgacatattgggcagcaaagcctgacctaaactgctgtgagactgagacttcttcctcatagtgtgactgttcctacattttgctccaggttttggggaggggagatattaaatagactgtctaggtgccatctaaccattttaaagtccaaaaacttcttaagtccaaaacacatttgtctagagttttctaacaagggattgcacactcctattgttatgggtttgaggactcacagtccagtagaaaaacaagaaatcccagagaagactcaatagaaccctttgcactataaatattttatagacatatagatgtttggggttacagaattacataattcccttctgtgtagtctgagtacagtttccaatggagacagcctgcagtgaggaaaacatgggtttgggaatcagaaggtggctgggccagtattaaatgcccctgtggccttgggcaggacttttctcctccctggacctcatccataaaatgaaagaatgggacaagatgatttctacacacacttccggttttcagatttctgtgttctatgacctccctataggagggataaaggaccagggagcaagaagctcagaaaaggtctcttttccacatgaagtgggaaaaggaaaagcgtaatcacgtgctggaccctgactggagatggaagtaacaccagccggttaactggggtgactcatgtcaccagttatggaactactcagatccttgggtgctgagtgaccaatacccagcctctggatggtagcagccctggagacaagtggggccaagggggggccctgtcatgccaaagctgtgatatcacatactgctgaaattgatttggctccatttcctgcatacctagcagatttaccagattgtgaaaatgaatgttttctatgcgcgtggctgatttttgcatgcatctgttcactcatctaaaccttagttacatcctgctaggagaatgaaaggctataatttcttcttctttaatctggaatagttagaaacaccatgatttttgctttaaaattctgcaccaaaatggtgaaccatttttatttttgtctcaggaaaaaaaaatgaaatgatactgccgtatttttttctagatttgcaaatgatcctgaccttaatgggggtcccatgcctgagaacatggcccttggaatagaaatatccagtggaatgcaaacatgagtatctaaacatatcatttgcatctgacattaataagccctttctggctttcacgtttccattttagatgacagtgccgtcttcacatgtcaggggtcaagtgcaagaacagtaatactagtatttatttagtactttgcatttctggggtgcttttattgcccttaattagtaaaccacaaataatttctgctcagtagcttggtactgcaatcttcagtgttcatggggacagtgtgctgtagtgactaacaggatagactttggagtcagtcaaactcagatttgggctctgcctctgccactaacttactgactaaccacttaccacttactaacttaccactaactaactgacttcagcaagcttcggtgtcttcatctgtaaaatggggatagcgacaggcttgtcacacagagtggatatgaggattaaatcagaatatgcatgtaaaatgcttaacgtaatgcctgacagtagtactgtatatatatacttatatataagtgctccatatgccttccctgtaaactagatgttggatacgttgccgtccgcaagtccttctgcctctgagaatcacatcatagcccaataagctacttaaaatggaaaagtccataggccatccccgtggaccaaagtcctgccacctttctggactctgaactccctctccctttccttctccaactgccaaagcctcttcattcttcctacttcattttgcacagaaatttggtttctttcactaatcctttccagccttactctgagggctctctttccactcacaagtggcccaacaaggttttgtttgttttcttgttttaactgaacagaagatcattctttccaccctaagtttttctatacaaattatattgaagatgattattacaatgacattttcaaaaagacaattctctccctaaagaattccgatacctgcttttaaattgccattcccctctcctcatggtatagatattatagtttacaacaagcccaggttcaagggctggtaaacccactgaaaaatcaaagaactcacccaagatcatgtagtcagaaacagagactgaattcagggcatgggaacttaacctcctagagttttcccaaaagcattgtttgcccctttgaacatggaaacaaaaaatagggagaagaccagacacagtggcttataattgtaattcctgcactttgggaggccaaggcaagaggatcgcttgagcccaggagtttgagaccggcctgggcaacatggtgagagagatcccttctctgcaaaaaaattaaaaaactagccaggcatagtagcattcacctgtggccccagccacttgggaggctgagacaggaggactgcttgaacctaggaggtcaaggctgcagtaaactgtgagcacaccactgtattccagactgggcaacagaacaagaccctgtctcagaaaaaaaaaaaaaaaaggagtctgggcgtggtggctaaagcctataatcccagcactttgggaggctgaggcaggaggattgcttgagtccaaaagtttgagactggcctgggcaacatagtgagacctcatctctacaaaaaatcaaaaattagcccagcataatggtgcatgcctgtgggtcccagctgctcaggaagctgaggcaggagaatggagcccaggaggtcaagactgcggtgagccatgatcacaccactacacttagcttgggcaacagattgagaccccatctcaaagagcaagccagggtgggcctcttaaagcacaggtttcttgagtggtcccagaggtaacacaccccacatggtctcactctgcctctaggggaggcacttcagaacccactgttaatcaggacaaaggatccctccgtggaacaattctggggagctgcattcccaagaacagcagattaaaaatcaaatccgggaaaggagctaaaaccttgcgtgctgcaagatataactcatgtgtacgtgtttgtgaatggcgtgtggggatggtgcatggggatggtgtagatgaggggatggatggacctatgaaaagctcagagatctatcagagcaagcctgggcaaaatagcgagactccatctctaccaaaagaaaaaaattagccagatgtagcaaaagaaaaaataaatagctgggtatggtggcatgcacctgcagtccagctacttgcagggctgaggacagaggattccttgagctgaggagttcaagaccacagtgggcgatgatggcgccaccgcattccagcttgagtgacagagcaagaccttgtctctaaaaataaataaaaaattggccaggcacggtggctcaggcctgtaatcccaatactttgggaggccgaggcaggcggatcacttgaggccaggagttcaagacaaacatggtgaaacctcgtctctactaaaaatacaaaaattagccatgcatgattgtgtgcacctgtaatctcagctactctggaggctgaagcaggagagtcacttgaacccaagaggcagaggttgcagtgagccaagatcgcgccactgcactccagcctgggtgacggggagtgagagcctgtctcaaaaataataataattaactaaaatttaattaaaaattttaaaattttttgttaaagatctatcagcagagcagcctggctgcattttgtataggtacagttatccatacttcaattgtttctgaattccagtcaaacaacttaacatagtaattatattcgcaatgactaacttagtatttaccaagtgcccaaatgttcaaggcattgcactggttagatttggcagaggacagagaaatatgaaatagcaattttctttttcacattgtccagtctaagctctggctataacttctatatttggcataaacaacagtcaccagagaccaataagacttggtcatttgttctgatttgaactcatttgtttaacaaatgagaagatttaacatcaaaatgccaaccttgggacagatatctgttttccaagatgctgaagcttaccaccaaatgatattttgatgtgctatttaggatgtttttgcttgaaactggctctcaatgactgtgcccttacttttgctggtcaggagcacagtgaaattgctctgaaaacaagcaagtgtcttagaaccccaagaatgaggcagtagcctcgtaaaatgggccctgctatgacctgaatgtatgtgtcaccctcaaattcatgtgttgaaacctcaatgtgatggtatttggaagtggggcctttgaggagtgattaggtcatgagatggagcccacatgaactggactagcgcccatatgaaagaggctcctcagagctcccttgccccttgggccctgggtggacacagtgagaaagttccatctatgaaccaggaagcaagtcctcaccaaacaccgaatttgccagtgccttgatcttggacttcccagcctccagaactgtgagaaagaaatttttattgtttataagccacccagtctatggtattttgttatagaagcccacatggactaaggctcccaagaagataaatatgccaactgttttctagtgccttcaggctggggcttcatggaagtggtggggagcctgaacgtgcgctgcggatagggttttacttcctgctacccatcaaccatgggataatgcctgacaaagatgcgaatgaccccggaaatgtgagtgaaggccatgtaattatgtaggctttcactccttctttctcagccgattcagctcttagccagattctcttgttccatcaccaggttttatccctgctaactttctttccccaggaatgattttcattgagatcgtagtgtgtttcctcaaaagaagactagattgtaattgggtgtccttagatgtagaacaactctcctgtttagatttcaacatatatatctttagctttaatgtgtgtatgagagagagagaaaggagaggaaaggagacgagaggagaggagacgaaaggagaggggaggagagtggaggagagggaaagtgattaagagagagaagatgtgaaaacttaagcactggccgggtgcagtggctcacgcctgtaatcccagcactttgggaggccgaggcgggcggatcacgaggtcaggagattgagaccatcctggctaacacgaaaccccgtctctactaaaaatacaaaaacttagccgggcgtggtggcaggtgcctgtagtcccagctactcaggaggctgaggcaggagaatggcgtgaacccgggaggcagagcttgcagtgagcagagacggcgccactgcactccagcctgggcaacagagcgagactctgtctcaaaaaaaaaaaaaaaaaaagaaaagaaaaaagaaaagcactgagctaaagtaaagaaaaaccactgggcaggacatggtggctcatgcctataatcctagcacttcgggaggccaaggcaggaggattgcttgaacccaggagtttaagaccagtctcagcaacatggtgaaaccccatatctacaaaaaaattttaaaattagtcgggcgtggtggcacacacctctagtcttagctacatgggagtctgaggcaggaggatcgcttgagcctgggaggtcaaggctgcagtaagctgtgatcacaccactgcactcagcctgggtgacagagtgagaacttgtctcaaaaggaaggaaggaagagaaggaaggaaggaagggagggagggaagaagtgacggaagaagtgagggaaggaggaagggagaaaaaaaaaaggaaagacctggattccaattcttgccctatttctgatcagatatgagaacttatgtggcagagatcagtcagctggttaccagaacccatttcctcttcctcctggcacacagatctacttccacccctcctctgcagttatctgtcaccttaggattacactttggctgatagcatgtgagtagaaaggatgtttactacttctagctcctgcccacaaaacttttcactctctgtgttctttctccgtcctcgggttgattgttaatagagaaagactgtgggagttacgggttaaagatgataaagccactggcagccaggacccctgaagatcacatggagcagaaaacacacacacacacacacacacacacacacacacacacggacacacactgccacactgccactgatcagattcgacatgaacaggaaaggcactactattatgctaatcctctttaattgtggggtttctctgttacaacaactcatactgctggagctgaaatgtgttgcgaagtcattttaacctcttctgtttctatagctgtgatgtaggatttgctttttacaaagcttcacttaatccacttgagattgaaatgtggtgtgtgtaaaaaagctttccttattccatgttcttttccagcccttccctgggcgtttgtacttagttgcagtaacagtttaaatataattttacattagctctttttcacttagcacaccagaagcatttttccgcatctccacagtcttcataattataaatgttaatgactgcttaatattccatcaagctgatgcactgtaattgtctaaaacaagtgtgagatgttgctgttatatcctgctttgagaaaatccaacttatcaagacaaaaaaattctctacaaggggacttttatatattgagtgccttacgtttccaaggtataatttaaattacacaaatttaataggccaggcgtggtggctcacacctgtaattccagcactttgggaggctgaggcgggagaatcgcttgaggccaggagtttgaaaccagcctggtcaacataatatctctacaaaagaaaattttttaaaaaattagccaggtatggtagcacatgcctgtagttccagcttctggggaggctgaggcaggaggatcactggagcccaggaatttgaggctacagttaactatgattatgccactgcactccagtctgggtgacagtgaaaccctgtctcaaaaaaaaaattaatagaccctcagtcacctactatacagagcaaagtacttgtattatcactgggaaaaaatttatatatatatatatatatatatatatatatatatatatatatatatatataatatttgtcagggttgtctgggggacagaaccaataggatatatatagatatataagaggggatttattatgggaattggctaacgtggttagggaggctggaaagttctgcgatctgctgtctgcaaacggaagacctagaaaagcaggtggtgtgattcatctgaatccaaaagcctgagaaccagggaggccacatatgtaagtctccagatctgaaggccccgcagccaggagctctgaagtcaggaaaagatagatgccccaactcaggaagagcgagaatttgtcctttgcattctactcacctttttattctatttaagccctcaacagattggatgatgcctgcccaccttggtgagggcagatcttttttacttagtctattgattcgaatgctaatgtctcccaaaaacaccctcacaggtatacctaggaatgttttaccagtgatctgggcattccttagcccagccaagttgacacataaaattaaccatcacggatttatacctataaagttggacatttgcactcagtggctgctggttgcagagaatcccagcttccctaaagcagacctcacccaggtgattttccccaagtgtcgggccctctccatctgttgtcccatctatgctgtgtctcgcggaggctgctgtgtctgtttcttagcataggatgagggagctgacacttctgcatgagctcagaggtcaaagggcagtttgccttgtcaggtggcaaggcacctgggctttaaggtgaacattgcacacggtccgcccaggcactgaggagtgtctagggggcagtgagggggtcctgcactcccgtgcactcacacttatatttgcatccattgtttttgtacatgctcatatttaaaaatttttgtctttattgcacaaacaagagtgaaacaatcactcagaaacttaccatagtaacagcccagcaatcaatggactgcttccatatactctgtttgcctacctccccccgactccccacccccacccaaagaatgtctacctagctgtatttgtctgagacagttttgttttctcctttggtcctgtaaccctctgcagggatcattgtcatgttgcttcacagtctcaatcttaggacaagattaatattgcaccatctacattctcaccgttggagtagtcactctaacaatttgcagaaatatttaacccagaattcaccatctggatcaaaattctgacaatttgcatgtgtgtgctgggaaaaacatttaggtttcgtgtgaactcagattagaggagcggaaggagctcagctgttctccggtcgggatggcaccatgtgttgtttaaatgtgtgcattatcgtgagcgtccatcctgtgttattaagtgaaaatgtcttccaagaaggatccttagcatgttgtttcattgtttatgtacattaccatacatgtttaatatggcagagaaggaaaacataaattgtgtctactactgtacagtatcttatagtgtacaaaatgcaatgagtgcccattccatgttaaataattaggtgatttgtgttttaaatgctttatatgatgtagaaatactttatgtgatgtagaaactgcttggtggaagcaattaagctttctaatattatttgagggaattgattggggtttccggatgggctgggaacacagtaatcttggtcctattcctaataatggaatacaggctcccactatccaaacttaccattttcaggaatgggttagatttttggtactgagggatgtctatatttatcggtatcctcgacttggctttgagcatcataagatcaggaacttaatgtactcatctttggatgcccagcacctaaccgtgcctggcatttagttggtttaattcacattattctgtgactacaccaatgaacagatgtgtcacaatttatcaaaaattgctcctgttattggataaatatacacttaattttcttttctttgtttttcttttgatggaaaattaggctttttgctgtctgtgaagggcatagccaaggaattttgatgcgtgttgcaaggcacaccaagatactacatatatgtggtcaaagctctcctcttctccccagctctcacaggtctggcttagcccaatggtattgagtccagactcaggaggacttagttctcttcataaaaagttgatcacctttgctttctcctttgcatgggcaataaagaagtgaaaaataaattcccagtgagcttgcattctgcttgggaacaacatagcacatccattttctagagagctgtccagtccccatttgagggctgctagccacatgtcaagcaggaacccagagtataaccaggaaaatgtctgtggtagaccccagtgattcatgcctcccatctccacaccctcctgtagtcccctcccacgctgattctggactaggccacatggcttggccagtggaacacatgcaggcttgcacgtctggaactctgccacctaatttaggatcccagactctcctactggagacacaggtccttagtgacagtctgcaccaccattcagacaagtcagtagggccatcttagatcatccagccctagtcaagccaccagataactgtacccacataagtgacccctggcgagaccagcaggagaatcatgccaatgggccaatatacattctgacccacagtttcataataaaataaaatggttgtggttgtaagccactatgtttcagagtggtttgttacacagcaataaataactaatatagtaggcataccatcaagtccaaagtaggtagagaagaatgtaaatagcagagcaaaacagcatgactggtggctgggaggcttaaaactgggacaggatcagagtcatgaaagaagtcaaagaaatggttcagaagtaaggctgagactgacttacaaaagctgaaagtccctttaagttggtgtttggtgcattggcaggggcaggtatggtgacttaaaagagccatgctcaacaagatcaagcacaacacaatcacgggtcaccccagcagaccttagcgagtctagccatttctttggtggtggtcacagtcatgcttcagcccagtttccacttggacaaatggtacatattttcaatgagatgaaaattaagatacaatccatgtgctcagagagtgatcacagctctgactaaacactgtgccccaaagtgttgaggaattgggaaaacctagctgagttagtggtctcttttctgttacaataaagctcataatgaaaattagccttctttgttcttccccaagtctttctttctagacgaaactactttcaactgttttaacttccttactgttaacttccatatttctagatagtatggtcagactgttatttcttgacttttaaatgtaagatattatctactgacttccttctatgtaagatgaggattgagctctcttacccttctcccatttcctcatccttccaacataaatatattttgggattatatcaacattcaatgttacttaaagtgaccttgtaaatattttcacaactgagccatgtttgatttgtatacttatgtttactttactgtttttcctgaagttaataattgccttgaatttatttatttctttaaaaatgtttcattactcaggactgtagtttacattacgattctttgtgttatacagttgatgggtttcttttctttcttaatttctttaaaaaatagagatggggtcttactatattacccaggctggtcttgaagtcctgggctcaagtgatcttcctgtctcagcctaccaagtagctgagactataggtgcaaaaaagccactatacctggctagtttacaggttttaacaaatgcattatgccacgtatccattattacaggatcacacaagatattttcattaccctgaaagcatccctgtgttccaccaattcatcctgcctccatgagccgctggcaaccactgatctctatagttttgccttttctaaaatgtcatataattggaatcatacagtctgtagcattttcagactagcttttaaaatttggcaatatgcatttaaggttcctccttaaatgtgaagggcatagccaatgtggcttgatagctcatttctttttattggtgaatatttcattgtctggatgttccacagtttgtttatccattcacctattcaatttgctttttttctgtgtatctatcactaattcaatactggactctccaacagagccgtaaagtgtctttaaatacatcaagtaacctatatgttctatttttccccaacaagttgtcatccactgctccatctgagccgactgcccagtaaatcgttctggtagtttcccattctgtcatccaggtagtccttttgcctgatttctgagtcgggtcttttgcttattggatctcatgtctttttctttcttggtttattccttcattttactggagtacatcctctagtcacttccttggaaaagatatgggaaataattttgtaaaaaaagatttggcaggtctgcaagaaatatttattttatcctcacagatcaggcttttctagacttaaataagtcccagtagaaaaacgtcaggttgctggtggcttggcataagcatacttccaagagattccggaatggttggaattctattatttcttctctttttggtctaattttttctactagcttgaaagccttctgactaatagccccccccacccacccccagctaatccttttgtgaattggtttgaattggcctcacttcattagttgagcatgggaaatgttaacttctgtacagagatatgtattatagcataagaatggttatggtcacttgttagtatttctctccccacttttggattgaaacaattacagaataattagagcagagactatttctggcaaataaaacagttaatagttggaaaggtatgttttagtgaagattgtttataaacacacctcttgctgccaggatcttaaagtctaattaattagtatcagcccagcctgcctctcctcttctgtcacttgctttcatcttccttcatgtacacacacgcacactcacacgagcacacaccccttgttgtcttgccttttcttttcctctttatctcagtctgcacaagtttgcacacagaattggcttgcctcctagctgttttgtccccacactccatcaaaaaatattttctgcatctctaatttcatcaagatatgcctgactgagaatgtcaaaaccactgagcagaagtgtttaatccaaagttggctccgccggtgatgatcagctgaggaaacaacctcgaatttttccctcattatttgttaggatgtcagtttttcactttatggaataggttcacatcctgcttctcaccccctgccccccactcttcattgggcagaggcctcccactgatttccaatagagctctctgcacccaagaaagacacatggagaagaaatggtacctggccgtctgtgggtatgccaccttcaacaaagatgtccataagcagacagtcacttcatggtttcttggacaggcagatcctggccatgttcatgtaattccataaggtaaggctggagaggctgagctgcccacttaacaagcaacaagccctgggggagtctgggcagcccaaggtagaactaggggtggaagatccttgcttggccctcggatggctgtacgacgtcaggacaggctgttaacccctctgagcctcagtgccgtcctctgtaaaatgggaataatatcagctacctcctagggttgctacaaggataaaaaccaagtaagtgcgtgtgaatgccctttatcatgaatgagaaggtgccctgtaaatgttgcttattagctgaccttagagataagaatcaaaatgacacacttttgttccaggtagtttttcccctttggcttagtccccttttttatgagggatgatctgctgtttaaagcatttattaatataaagattatgaagggaaggatttagaatgtaattagtggggaagggggcctgcttctctgggatgagaacgccatgacttgttggctcagtacagcacactggtaatcttgtttcctgaggctctgcacacgctgagagcacatcgtgctcacaggcacacttagtgaatatctgagaatgtggtgagggagaacgtgtgtcaggaactgggcaggtgggcggcacagattgccattcctgcactggccgtgattgtagtaagtccctcatggacactggtagaacccgaatagacatcatcaaatggatgggtcttcctgcccgctgtttcagtttgcctcccagtcccctctctgcccaccatccgcacaagttgcagaatctgcagcctcaccccactggacaaagggctacagatctgccagtatatcgtaactcacatggtaggcagtggcttatgggatctttctagaagggagaaggccagactcttcagggcctgaaggcctgtatttaaatttcttcacagtttggaagaaagctactgtgatggtcaattttaagtgtcaacttagataggctatagtacccggttatttaatcaaacactagatgtttgattaaaaggaaggtattttgtgagtgtggtcaacactacagtcagttgatttatgtataggtggttgccctccataaggtgagtgggcttcctctgattagttgaaggtcctacaagcaaaactggggtttcctggaaaggaaaatctgcctcagaaccatgacatcaatgcctacctgagttttcagcctgccagcttgtcctgcagatttcagacttgtcaatccacagtctcatgagccaattacttaaaataagtctatctatgtatctgtgtatctcttatggatcctgtttctctggacagccctgactgatacagctgctctctatccagagattacctttttctttgactctattgcaatccaactctcagcagtccagaaaatgaaacattttcttttcactaggaaaaccaactgtgttactggaacaacaaaccaggcaaatgaatcccaaatcatagtccaactctgatcttgaaatctactaagctttgataaaactaagatacatattttatcttttaaaaatcttgatccattttacctcatcagaagtggggagttcaaatcatctgcattctaatcccatatctgtcttggttctcatcactgttcagcctctccttactccctgagatgctcgccctgttggaacacatgccccttggcgaggaatctccatacaccaccgagctggagttgtctcggggcccgaggcagtgggactcacgttgtaagctttaggtgtcaatgaaggtgtctttccttgaaagacactaaaacttgaaaaagttgtcatctcataattccaggtgccaagatcactcaggagagaaatgctcctccctgtttaagttattatttttatctccagggtcatttctggaacccttcatatacattttaatcactttaagtctgaatcacaaacattacaaggctcacctttggccattcccaggcagatgaggcagggtctgggttccgtgagtcatttaccacagactccagttggaagcagttcccagtggggttacgtgtgagccttttcaattgtccgtgactgtgttccgtatacacatatcgattcccctctctaattcccagagctagtgccctgcccttctgtctggcttgggtggagcccctgaggggtggggaaaggacctggcgccactgagcagacgtcccttaatggtaatcctccagtgagtcaatggcctccaaagagaccatgagcgtggtcttgttgatgaggaatgtagtcacagtcacacaaaaaagtccccagtctctgcctcaggaccccatgcatggcccatcatccccgctgcagaaagaaactggacaggacctccccttaggagcctgtcagcccttgtcagtaatcagcccaggggctactcagaatgactggaggcactcacatccaccccctaccaaccacactgcccgctctcagcccctgccacctggggagccccacaccagggcagggcaatcaagcttggcttctgcatgccgtgcaaagcttgccagcagccaagctcttgaaatatttatatttatacatgcaaggctcagactctcgctttgtcccgacaggcgccatcgtatgtggggatggggtatggttcgggagggttcattcatcccatgctagcgtgcctacccgccaaggctcacttgcgcagaggaggagggatctcaccagaatagtcaaaaagttggccattgtcatgaatcaaatccatgtgttggaagaaatatacattagaaaattgcatagtctccccttccctttgattcagagattttcgtttcatttgtgcacagggaagagttgaaatgcccctcctgaggggtgcccttctggggatgcaggacccacggattgcagggtgtacaaacacaatatatgtatttattttcaaagacaacatgaaataacaccatagagtttttgtggctacctgttctcttttgaagaactgttcaaaaactagatgatgggcaaaaactctatagaggggaaaggaggcaggaagagccacagtttcagctaagtcagacgggtgcactcgagactcaattagcaattgttcccatatatttcaacacacacaccttaaacacaggttttctgagtgaagtcagtgatgaaagcctgtgggttaggggaattttcccatggtagcgacagctgttcccacagaaacagctcaatttatctcagagatgaaggtttcactagcttgggcctctcatcaaattgcatgcatgggaattatttttaagcactctaaaatggtatcatttcctagtggcaaattatttgggtgtattttgaaactaattaaaagggaaatgtcctattttgtaaagagcagcatttctacattttaaaaatcagatgttctcagtggggagcagggttttctcttcgtcagtgttggctattgctaagtgcgtcccagattgaaaacctaaatgaaataactacaaggaaaggcatggggtaagcttatgttggaaaaggtggagggagacacacatatataatacatacaccatttatctgggaatttagaaagccttttcatgtcatctttttttctttcttgctcattgcttgttatttcactgtgagccttgcaaatatggagggcggcagaggtgccaggctccatcacggtgtccaaaaattggctttgtacatatgctgaattagagattggctggcagaagcagtgtgcagaccctagattggcagggattcctcgtgacggaagacagggctatgaacccacgggatgtactctgaagccagcagccatgcaacgtgctgcatccccacatgccaaaacctgttttcaaatacattcagaatctgcatcaggcatcagatcccacccaggtaacgccctccaaaactcgaatcccctttcctttctcatgaggaagggaatgtgttgaacctgtcacaggacagagatttgaaatttttcacccaaggctccaggtcattttagtcaccacctcttgtgaataggcaccgtagcatccaaggaggaaggtaggaatcttgcagatgcaaaccttcctgttttttttcttccttggaaataagcaaactgccaaggcggttctgatgcaggaagaatgaatgcagtgaaggaacacgttaagacagccggagcagggaagtccatgccaaaaagatccgccatctggggcttttttctcactgtgtcaaccagaaaatgcctctctcatgtacaagtagctagttggtggctttactcttcccaagagatctactttattttatgggcaatgatgagttttaataaaagcagggttgttgttgttgttgtcattactgatcttgggtttctggtttatcttagaattgagcactagaaaggaagtgaggagaattattttctagaccaataggtgcttttgactcaaatgatgacattggacacttctaggaacctttaaagtagggacattagctccagttacgtcacctttcctctaagggtacagtgaaggatcaggagctgaacaagctgacctcagtcccaatcaactccgaaatgtgacagctgattagagccttgcagcctttcaggtactgtttaatcatttactcgcttgagtgtataagctccgtgagagcggagagcctgtctgcccatagcacacactcaggaaatattgttgaatatgatcattgggttgatggtctcacggggtggcaccaagggggccagcatgtcaagcgtaattcacaccggagcaagctttgggtcacattctgaatcatatgtgatgtagtgaacaagctctcggatgggcttcaggggatgtgcgttcaagtcctggctctccccccggcatcagagtgaccttcagtcatttgttgatctctctctcggacttttgtctccttgtttctaaaatgactagataattgtagagctttcttcagccctaaaattctgtgattctgaaactcagccagtcatctaaaaatgcattttctgcatgatgaaagatatttattaggcctaagtggaagagccagcattcttgatgaaaagaattactctatgcacacatcctaaggacagtggtttagatcagtgccctcctggtagagatgaacaacacaacgggaaggacaggcactgacgcacataaagatgaggaggctgagcgtggttccaggcaccactgcggtatagaaagtggcacctagagccagccaaggacataaagatggacttggagacactggagcagtgtgggtgcccctcagcccaggaatgttgcagagaggagtcatatgtgagattagggttgccccaagttacctctaagttctgtccaactcaactactctgtgagtctgtgacagtccctagctctgtgtcctaggacacagtgacacccctagagatcttaccaaagacctcaaatagtccaggcactgttcctcttaagggatgtagagaggagagggagagatggaaaagggagaactcacctttgttaacatactgctttctaataactcttttaaagaagtgttcattccattgttcatggaatatgcttccagtcgtggattgcattgaaaagataagtccatgtcctaatccctgggacctgtgaatgtgaccttatttggaaaaatggtctttgccgatgaagttaaggatctcgagaaaagaccatcatggattatctgggtgggcccaaaatccaatgacaagtgtctttttaagagaaatcagagacacacagaggagaagacagacacagaagagaagtcagacacagaagagaagtcagacacagaggagaagacagacacagaggagaagggcacatgaaggaagaggcaggggttgggtggcggcagctgcagggactgccagcagccagcaggagctgcaggaggcaaggaggatccgctagagagggactgcgccctgcacacacctcaagtccacatttctgggctccagaactatgaaagaatacatttttgttgttttaagctgccaattttatggtcatttgttatggtggccctaagaaactaatacacctcagatatattatcattgataccattaatcaggagctgcaaggtctcttttcctaattaacatcatggttgttcttactaataataagaataaaagaactctcagggaggcaggtggagggagagcatcaggataaatagctaatgcatgctgggcctaatacctaggtgatgggttgataggtgcggcaaaccaccttggcacatgtttacctatgcaacaaacctgcacatatatcccggaacttaaaataaaatttaaaaaatgaacaaataaataaataaataaaataactctatcttaaaacacattaacaatattattgaagaataatattagatcttttgaagtaagcatttttttttgcccgtgtaatagctgtctgtaaatacccgcttcttgagtgaaccaccattttctttcttttttttttttttgtagaaggaaacacacgctaccagaaaaaaaggggccccattttgatatccctccatccctggccttgttttggtaactttgtttctgtaccagatccacactcaatcaacctgtctggtttagggtatttttagcttcatagagcaatagtatcaatacaattctgctgttttattatacatttatcaaacagttcactatctggtcttttggccagaatttcttggcctcttctcagagctctgtctcaatagatcttttgataactgttttccaacacagtcttcatttcaatgttagaatatgatgttaatgaatttactagcttccagtcgaggatgaatagcttacagtgtttgcggcaatattggatgtatttatttccaagggaatgatttttaacagcacattgtgttcttatttgcttttcacaatccagttccagcatctgagaaactttgctttgatggttgactcccattagggaaacactgaaaacaattatcctgtagtggtctcggttcttcctggcagctttgcatttccatggtgcgagaccactgggtcgtaccacttgtttctccctccacgtcctcaaatgatctcttaaaagaacccactttagacctcattgttaccttccctctacttctttttcttcttattgaattcaattcaacaacatgtattaaatacttacaacctggtacccaggtagaagaagccaacgtatagacagggcatgtcattggatagtgataagatctgatggggtgagtatctaggcaacttagactgggtgtggggttgaaccagcatatttaaatttatgtaaaaactgagaaacaccctgaaaaggacttttattgttggacataattctctagtcctgaagttatcattcaagggagttcaagaactcatcccttaagtggactgggcaagctggccatttaccacttgtcacagttagaattaggaacttggctttcatattatccattggtgtcacagagtgggaggaaaacatcagtaatggatccataggaccaccagtggaggcaaattgaatttgggatatgttatatcaaatctgttaaagggaaaaaaaagaaagaaaaggaggggagagaaggaagaaaagaaaaaataaaagaaaaaaacccaaaagaattcattatataaccattatatgttaatggtacagtttaagagattttgaagtattgtcatatatcatttcattaagtagtatatacatacatacatacatatatatatatatatatatatattttttttttttttttttttttttttttgagatggagtttcgctctttttgcccaggctggagtacaatggcacgatcttagctcactgcaacctccacctcccaggttcaagcgattctcctgcctcagcctcccaagtagctgggattacaggcacctgccaccacacctggctaattttttgtatttttagtagagacggggtttcaccatgttggccaggatggtctcgatctcttgacttcatgatccagctacctcagccttccaaagtgctgggattacaggcatgagccactgtgcccggccagtagtttatatttttattccaccaattcttattcttaaaggaaagaaggattaaataagccctaaatgttatattacattagaatctttgaattgctgccatagctacataatggtgtggaaagtagtaaacccatttttcccaacttatgggaaagtacaaactaaaaatgagtgaatgaattaatgcataaataagtcattagaactctgccatcagagtcctccagtcacctcccccaacacatactcaaagacagaaccatccctgagtgcctaggtatttggcactgccagagcccctgagcaccaaatgtgacaggaagcggggttaccgtgttgcttttttttttttttttttttttttttagatggagtctcactctgtcgccaggctagagtgcagtggcgcaatctcggctcactgcaacctccaactccctggttcaagtgcctggttcaagtgagtctccttcctcagcctcccgaatagctgggattcaggcacacaccaccacacccagctaatttttgaatttttagtagagatggggtttcactgtgttggccaggatggtctcggtctcctgatatcgtgatctgcccacctcagcctgccaaagtgctgggattacaggtgtgagtcaccatgcgcagccctgtgttgcttattttgaggacacctgggcacttccagccctgcctccttggaagtgggagggataactggcgagagaggtgggcatggctgagcatgcagtgggaggcagaacaaagccagagtcccacaggtaaccttctggccagtgcctggttcacgcagctttaaggtgctccaagaggactgggagacccctcaggaccacgggagccttgggagaaaataaagtaatgcctgccaaggtgccaagccagtgtcaagcaggtgggcccaggaagtaactcagtctcaacctgcttatgccaggactcctggtgagcccacagcctgggagggcatacgagtaggtcctgtcccataatagattactcagtcctgactcatatagggggcttatgagagaaggaatcctaaggccttcccaggtggcctgcaggagcctcaaagtcagcattgcagggaacactcattcccccttcctgaagtttctttccttcaggagggagctccactggtgcagtgctgtggttctcccaccccagcccacatctccgcagagccagggtgatgcacccagtggctatcctggcatatgtagctctgcctcctcctttttccttcctcgagggtgtgggctgcccacaggcagtgtgactgattccctgctccccggggcccactctctgccacacaggatgttctcggtcctctgcagcctgatgataagtcagtctaactctatggcccagtattaaaagaccatgtggctctttcactcacttctgtcctcaacccagcctttatcagaaatgaaggaaatgttctaattctcctcctgctgacacttttgtcttattgttcaattggttcagaattttgacggtcaagaggtgatgtgatcgagatcctaagcaaacacctctaaactaaaacaatcatgtacacttacccccaaattctacctattgttcttccctctattgttggaacacacctccctcttcctaacacacacagtgagaaagggaattctccaagatcagtaaaaagattgccaagtagtgccaaagcccagagcctgtctctctgtggttacctctttccagatgcttttcttgctcctgccactactctgttctcaccgtcgcctctaccctctatgagcggctgattcatctctgcttttgtgtcagcgtgcaggctaagctgctacaacagaaaagacacaaagcaacagcagctcaaaccaaatgaagtttatttctctctcacccaacagcacagaaagaggtagccgggtggtccaaggcaggtgggaagtgctcctcctccatgttcattcagagacccacgttgcgtctgccctgttgctctgacatcctcatctgcatggctgatgccggctcaccctaccatgtttgagttccagcatcggagatggaggaagagagagtggagggcaggtggcttccttttaagggttaaatgttgcctacaccacttctgttccattcgcatgctagctgcaagtgggtctgggatatgcaggctttaagaagtgccaaaactcaaaggaaaaggaagaatggttgctgtgagccatcagctgtctctgccacacccctgtgcaaccacatgtgatatctgcacatcaccctgcactgcatttttgcattgctctttattgcatttttgcatccccaggacctagaacagtgcctaacacagctgagtagttgaacagctgagtgaatgatgaaggcctttttcccccagcaagccaaatcccagacccaggtaagagtaaaacagaactaacagagacaagacttgaggatgctgtgaaggtatcactgtgcacagttaaccaggaagtccagggtaggtggtagattggcaagaaaatctgacagtgagctgaccgcccaggggccaggacttggaagacaggggaaggtaaaccagatgacaacgacaaggggcagctcagggaggagctgtcattagagaggtggatttcagggcttgagagttcgggatgaggcaattttgagaaaagtgaggccaaagtatgaccaagtcctcagggtgggtgttggggaacatgcagtcatgagatgggatttctcctggcgctgcttggagaagcttccagccgtgagtatgagggggacttgaaagggtgacacagtcagacagtgtggactctgccagggggagcgttggttggtgaggcgaaggaggacagagacgcagatctagaagatgtctccctctacccctggccctgcatacaggggagtgaggcgtttcttcccctggagagggtggtgacacaaagcaggacaaagccaagcctcagttccagcacacagagtggacagtgttccagggagtggctgcttatgtgagggaatttgtaaccttccagaagctacagtgcagtaaggtaggaggtagggccaggaggaaataggcccgcaccaaatgcaggtgtatgaagaatggacttaaccattgtcacagtgtctagtaactaccgattcagaggacaaagtcccagtttcagggctctgcatggtgatgccacggtgccacagtgtgatggattacagggatctgttaaaatacttatatgcactttcctatgtttaagctttttctataaaaagtatatattgcttttatagtcagaaaacaatgccacttaaatcattaaattcttccaagatggtggtgctagagagattatttcatttctgtggtccttgcttagctgtaaaaggagagttggaaccaaacaccgcatgttctcactcataggtgggaattgaacaatgagaacacatgaacacaggaaggggaacatcacacaccggggactgttgtggggtgggggaagggggagggatagcattaggagatacacctaatgctaaatgacaagttaatgggtgcagcacaccaacatggcacatgtatacatatgtaacaaacctgcacgttgtgcacatgtaccctaaaacttaaagtataataattaaaaaaaaaaggagagttggcctcagaggtccccacttaatgcatatcattgtcttcctgctcagctctcataggattcttgccttcagtgcacaggtgggaactggaaaaataagggtcagggccaggtgtggtggctcacatctgtaatcccagcactctgggaggccaagacaggaggatcgcttgagcccaggagtttgcgaccagcctgggcaacacagtgagatcctgtctatacaaaaagtaaagaaaaattaaccaggtatggtggcacacacctgtaccctcaactaattgtgggggtgaggtgggtggatcgtttgggcctggaaagttgaagctgcagtgagcaccgtaattgcatcactgcactccagcctgggtgacagagcgagaccctgtctcgaaaataaaataaaatgtttaaaaaacagtcatgatataggtcaccaaccaagagcagaaattatcatgatttcaagttgctttagccacaatatttgccagtagtgttgcaagtagaaatgtcacctagtaaaatggagctacctcgtggagatctgtgtgatgggaaaatgctctgtgaggattcatggcacgtgctcaaggggctgctgagttcctcttctcaggcaggtctttcttctctgtgctttgggcactgtttgcccaataggcgaggcatttatgtgtgcaccagcgcagcagcttttcaaccctggccgtccagcagggtcacaaggggagcctttagaagcacgtgtccgagccccaccacacacccatcaaaccaaataaagtggatatccccaagaagagtggagacagaaatctctacataccaaaacgtgtactaagcttcttaaccataaatgagaaacatttttgtaaattacaaatattattttttacatgatatctctggttttccctcctctctgtcaagtggttttaagttctcaaaatcccaatgcttttatatctgtgaatgcttcttgaatacagtttaaaaatgatagtttttatctattcttcaaatatgcataagtaattatatattagatgtatttataaaggtaaatattaagtttcagctaactttttaaaacataatttttatcaaaaatgacaaagattgaaagcttttatatttaaaactaagggatactcaaaacattagatattttgcattttcctaccataagatgcatagtaagttgacatattaggccagcaatatgttatttttattcaaaaagaagtaacaaaagtgagtatctctactgtttggaggaggggggttctttcgagataactgatcagaggagggttatacagagaatgttggatgttaaagccagaaagaaccttagagtttatcttgcatttgtagaaactgaggccccgatgcctacaatttttatctcagaaatgccaccgtgtgtggcatatttttcaaggcacataaaaatgggttgctgaaaaattctcaatccatgtattgtttttcagcttcagaagaatgctaacactgacttttgttaaatgctgtaatcttcccatattactataaattgtcaaacatttcacattctttttctttttttgaaacggagtctcatgctgtcacccaggctggagtgcagtggcgcaatcttggctcactgcaagctccgcctcccaggttcacgccattctcctgcctcagcctcccgagtagctgggactacaggtgtccgccaccacgcctggctaattttttgtgtgtgtttttagtagagacagggtttcactgtgttagccagtatggtctcaatctcctgacctcgtgatccacccgcctcggcctcccaaagtgctgggattacaggcgtgaaccacggcgcctggcctacatttcacattcttaaaagccttttggaaaactgagcaactggtattaagaatggttagatttgagaagactaccctaaagaccatattgttaagcatattgagcagatgaagagttacatttgtaatcaactaaacctttttatcaatctccatgtgagtcaacagtgtagccagccagccaggaattaatgcacttacaggtggggcatagcatctggaagagcagtgggagcgcctgctcagagtttagaaggggcatcaccaaacctgggtatgtccagagcagggcaactcaagagggcagaggatgttgaaagtgtatcagagggtttcagagagacaatgatcagaactaggagggttcgaagacagaagacccagggaaacatacggaccacacttacatatctgaaggtccatccagtggctgtgtttacacagaaacagatcatcagttgccaagaggatggcagggctcttgccttggccagagctcctgaggtaactatgaagactcttcccaactccaagactctgattctgtgattctcactccaggacctaacctgctgatgatgtttacaaaatacaagaaagaatcctagctatacgaatctgacagacatgaggaaataatgcttcgtgtgtgtgtgtgacacaccattgggtgtgtgtatgggtgacagagagacagaacagagtggtggggaggggcatggaattttaaaagattaatcttttaaaaattttttgtgggtacatagtaggtatatatatatttatggggtacatgagatactttgattcaggcatgcaaaaagcagtaatcacatcacggaaaatggggtatccatctccttcaagcctttatcctttgtattacaaacaatccagttatacccttctagttatttttaaatgtgcaattaaaaatagttaccctgctgtgctatcaaatacttggtcttattcattcatatttttttttgtactcattaaccaaccccacttccccacccacccacccgcactccccacaccccttcccagcctctggtaaccatccttctattctctatcttacaagcatatagttcccaggaagggtagctactctgtgccccaccccacgctgggaactctgagggcttcaaacacagtcccaacctcaatgtctgtctcatctatctggttatagagacaagactaacaaccctgcgatggtcagagacaccaggagacctcgggaactctgtccttgtggtcctcatcccttcattctcctcctgagcccttactctcctttccttaaaaaaaaaaaaaatcactatatacaattcacccatcttaatcataaccacctccattcaaaaaggttacatatgcaggccaggcacggtggctcatgcgtgtaatcccaatactttgggaggctgaggtgggaggatcactgggggccaagagttcaagaccagcctgggcaacatagcgacagcctgtctctattaaaaataaatttaacaaaaaccaaaaggccagatgcagtggctcacacctgtaatcccagcactttgggaggttgaggcaggggaattgcttgggcacaagagttagagaccagcctaggcaatatggcgaaaacctgtctctacaaaaaattagccaggcgtgggggcatgcgcctgtagtcccagctacctggaaggctgaagtggaaggatcacttgagcccaggaggtcaaggctgcagtgagctgtgatcgtaccactgcactccagtctgggtgacagagtgagacccttgtctcaaaaaaaaaaaaaaaaaaaaaaaaaaaaaagggttacatatgcatatgaaaaaaggcagaaaaccgtattccctactgccttcttagttaaacagtaccaaggtagtgtttgttgcccaaacatattaaatatggcttatgaagtcagcttacacgcagtccagatttacatccttttaaaatcatttctctcacctaaaccataacagcagcagatggacagaggaagaaatggaatgtggtcacattccatactaatattatgaagtactttcacactgcaatgagtaaaggaccatctgcaacctatagcctgtgtttctgctgagaaactgattccggacttaaggtttctaatttggaacaaaagcactgagcaggttgctctttgtaattttttatcgagaggtggagagcatactaggcctacctggattcctgaagaattcagcaacctgaagagcacggcgcacggaggaaagtagactctagatctttaagatctgatttcatacaaaatgagaggtctaaaactagatgccataggagagaaaaagtaatacgttttcctcacacatcttaaggttcgtgactgaggtacctataatgaaagacagattaacaggagaaaaacacatacatactttttttttttatttatttatttttaagacagtctcagcctgtcacccaggctgaagtgcagtggtgtagtctcagctcactgcaacctccgcctcccgggttcaagcaattctcctgcctcagcctcgcgagtagctggtactacaggcgcgtgccaccacgcctggctaatttttatatttttagtagagatggggtttcgccatgttggccaggctggtcttgaactcctgacctcaggtgatctgcctgcctcaggctcccaaagtgccggcatcacaggcgtgagccactgcgcccggccacacacattactttaagctttacgtgacaacgtgggaaccttcctaaataagacccaaagaaacaggaacacctatgtattttttttctttcttttcttttcttttcttttcctttttttttttttttttttctgagacagggtctcactttgtcaccgagggtggagtgcattggcttgatctcagctcactgcaacctccacctcccaggttcaagagattctcctgcctcagcctcctgagtagctgggattacaggtgcacaccaccacacccagggctaatttttatattttcaatagagacagggtttcaccatgttgaccaggctggtctccaattcctgacctcaggtgatctgcccaccttggcctccctaagtgctgggattacaggcgtgagccaccgtgcccagctggaacacctatgtatttttatgcttagatttgatgcaagtcgacagtcgtgtagaagtgtgattggatgagggggcatgatctagcagtaataaaccgaggggaatttggcaaggcctgtttgttcaggttcttcttggcatctctgtgtcttcaaggataaggatgttcctttcctttagggatagagagggcacctctggaatgaaagtttttgactgctttggggagaagggtgggggaaaggtgagagaaagaccttcctgcttctgctgttttctcaaatgtacattttgggtagtgtgtcctgaaccccatcaatgaacaggctgcctctcgttgtctgtgagttgatttgccccctctaggactctctcctggtgccaaaagactagcttcctgttctttccttttggtcaggcactagggacacaagagctataaataagctaccttcccagtcctcaatgtggtcagagtgctggtgtaaggacatctggttactgaaaacagggccaacctaatatgaactcagaaccaaccccaagtgggtgtgcacaggaaatgggagtttaaatctgtacagcccttttttttaaaaaaaaaagcaattttagtttacatgttaaaatagggatatattagccagaccatgtggtgtcagcctgtggtcccagctactctggaggctgtagcaggaggatccctcgagcccaggagtttgaggcagcagcaagctgtcatggtgcttataaatagccgctaccctccagtctgggcaacatagcaaaaccctatccctttgcggggggaaaaaaaggcatttttttttaacctaacatttattaaccacttacgttatatgatttcaatactcaccaacccttgagtcaagcactattcttatccccatctttcacatgaggaaactgaggcacagtgaggttaagagactgtccctgtctcgtacacaggcagccatcagcacagtgaggacttgaagcaggatggcttgcaggaggctgtgagagttggagcctcatggtcattcctttggagcctcagtgagcaggtaatttggcctggcatttccacttccaggatttgtcctaagggatcagtcagacaaaaggactctaagatgaatgttctgggatatttgttgcagctaggtttatcatctttcgggaatcagggcaactgtcacatccccaaagaagctgtcttgccaccttgtctcagtcgctacacccccatcactcctatcccattagttaattctgctatcttcatagtttcacagtctacaattgtttattggcttacttgtttcttagctgttttcctgactggaatataagttccatgtaggcagggagctgttctctccattacctaaaatggtagctgacacataaagcatattcagtaaatatttcttgaatgaaatgaacatattaatggcaaacagctggggaaaaattaatctttttttttttttttaagacagagccttgctctgtcacccaggctggagtgcagtggtatgatcttggctcactgcaacctctgcctcctggattcaagcgattctcctgcctcagcctcccacgtagctgagattacaggcgtgcgccaccacttctggctaatttttgtatatttagtagagatggggtttcgccctcttggccaggctggtctcgaactcctgacctcaggtgatctgcccacctcggcctcccaaagtgctgagattacaggtgtgagccaccatgcctggccaaaaaattaaatcttactccatagggaattggcctatccatgcaatagaatacttggaagtcattacaaatgattgtgcggatcatgtcgagcataaacagataccctgcctgtggctgagtaaaaaaggccggtgacagaatgcatgtgcagtgtggttgccgtactggccggggctgctggcagctaaccacagaatttcgtttactgagtgtaagcagaaaacaaaacagtttattacaggctatcgggtaactcaccgaccctcgagggtgtaaggaagggttctgcagacaaatgcaagattgggagcccaagatgggagttctgcctcacctcaagtgctgcctagttgtctggattccagagaagtctcctaacctctctgttcttcaggcagatgtggataataaaatctgtgctgtccacactgcaggactgttgtgagggcaaatgagatcacaggcatgaaagccctttgaaaagttagaagaggactgtgtatatattgacatcatcgttatcaggtgattttgaacgttggaacacatgtattttgtccccaagcccctggtgttggcacaccattgggacaccattggtcctctctgttagctgcctgcacatcactcagtgttaagatccccctggcagtggtctggataaaaaggccggtgattctggcagtcgtgtttgctaagcttgtcctcaaatcatcttcggtgtcctcttgtgacttcagtcactctccctgtggggtgacctgtgtctcagcttcgggcctgcccttctcttgaggcacactaatcttgccatcttcgaaaacaggctgttctcatctcgggtctacactgtggcagccacaaagctcggctttttccctgaaagtcttccccatagcctgagagctgacacctagcgcgtgggcattcaaagtcactgtcaaccagggcttcatgcatggttcaagccattgactaggtatcaaagaccggattcaatgaggttttaaatttccgtacaattccattttttccatcctctttttatgttttttaaaaatccttcattgcctacctaccatcagaggaaaacagcgttgtgatatgatgggggattttaaccaggtactaatattgtgaaagagaacgttagtggtcctgaaactaggcatatgttgtaaggtggggtgattttcccacttcctgtatgtccagaggcccttcctggcagaacttccagcccaggagactttcatcttcatctcgcatgaaggatacaatttcgttttgacgcacggtttagagaagccgttgaacgtccacacaatctgttatgctaaatcacacctggtgtctgcacagagaaggctctggcaagagtttttgccactgggaccaaggcctctgactcagaagccaaaacatggcagtgttgcagggcgcctggctcaacggcacgggaaattaacctgcttgttctcacgttaaatgctttatgaaaattcaccgggcgcaaaaagagggaagaaaacccaagtggttgtgcagtgcgcctgcctggcaccagtgaaggaatgaagctgcggaaaaagtcaatgtgaagagctggcaggaggagaaggtggaaagcgcgatggaaatcaaatgcggtgccagccacggcattgttttattagcatttgctcgaggaaaacatttaattatagaagatcggaagctcccagtgtttgtgagctaggtgacatgacgcaggctctgccacttgctccacgatacacatcttcagaggaactgtggcacaccgcgacaggctgcgaagagaagccacctcccgggggcctggtccttgctggggggcccttagctgtaacagcctctgttctccagcgatcctcagtctgccttttttaaaaaattaagtgtcctgctggccgtccttcttctccttcgttttctggtttttccacattatatttttcttttccttgttgatttttgaagaaaataaaattgacaaagaataggatggaaaagtactacccttaaaaatgcttatatatttgccacctaaaaaaaaaacaaagccatttttcagttatagttttctttgggaaataattaggaagcaaaacaaccaagaataaaaaaaaataaatgggggagcatgaggctgtagtgaactctgtttgtgcctgtgaatagccactgcactccagcctgggccagcagagcaagaccctgtctctacaaaatacataagtaaaataaatgatctaaaggactcagtatatatttaagcaacagaaatgaaaacatgcaaaggtggaaccaacattacgaatgttgatggatattaccaatattaccaaatattgtgtggagatttttttttttttttttttttttgagacggggtcttactctgtcacccaggctggagtgcagtgtcatgatctcagctcactgcaagctccgcctgtgtggagatattttttattcctttttgttttaaagccctgtctactttaaaaatagtttgtgaaaataatgatgcagtatcacgtacctgcaggaagtatttctttgtgttccattcctgccatcacatagctgattgtattacctgatttcttcattcgtgtctgccaggaagactaattaatgtgctgctgaatataaagaatccttgtttgggatgctgccctgccacacaaggcagtgcttcctccagaagacaagaagtcaaggactggcttctgccgctggctgaaattagcattggctcagtttgtttagttgcaaggctatgtgtgtcttgtcattagacatttatacttctgtggataaactttataatctacttatggagacaagattctttatgtcagcaccttagagaagtgttgtagaagcagttggcatgcagacaggagtctcctacagcaacgtgggcacagctgagtcggtcttaacccaccttagggcatcctcatacctgcccaactcatacctgcagaaattgatgatgggcagggaaataagtgttttcctccacagaaatgaaaaaaagtttgcttttttttaacaaattggtttttgatatctgtgtgaaggggacaatttggatcggcttccagtaatgtgtatcaggtcagctggagaactagagggagtcactggctgaaagatgttgtgaacatcactctaaactgctcaggccagggacaggtgacacgtctgttatctgatgtgtatctggaaccatggtaaggctgccccattaaattatgagccaatcactcttgatttaccgttaaaaagagtgaaaggctggcggaccctgccctgcacaggtaattcatggcacctttggaaaaaggcacgttttcatcctcataatgaagaaagctaggtacgaggtcctttgatgacactgttcccttttgcttgtttacttttattctcccacgcagactgagacccagcaggaggcttttaaaccaaaacagttaattacctcctctaacccggagaagtggggaaacataaatatagcgagttaagagggagagagcagctttgctcctgactgtactttgtaccagtcggttggggaaggcagctaccttctctttcctcactgagcccgggctaagcgagaccaattagaaggcacgtgccagggagtgggtccacatgctaccatactgttgggcttccagaattctttcagtgctctggagaggagcccacctgagaaacccacgtacagatacccattccaaagacaacattgagtagctttggggctctggaccctccttcgaaggaaggaactcttgggcaggtggagtgagcagggacccccaacttgaggatggatcctcccgaaggcaggcagggctgcagggcagcttctcagagatacttctcaactgagctgtgagtcatgacctgtcaccaccatggtcctttctccccaatggaacggagcgtcattccttgtgtctccaagccctgggctgcccctgcccttcagggctctccattgtctgcctgtctgtctgtctgcctgtctgtctgtctcctggttcaagctccctccctccatagcctcatatgtacaaatcatcaccttgctgtgttccctcactgttcctgccgctgccctgctgctgtcctttgcccatttctggctctctcacctcctctgcacttactgaaatcctgttcagtcttcagaggccacccgagtcccagactcccctcctccaacccccttctcagcttgaggtgccgtcccctgcttctaagtcccaagggccccaggatctgttccactgactccaactgttacttcacttctcattatatggggctttcatcgccacaactggatgataaattcccagacttcaacagggagtgatttatggatcttttccctatgtcccacacctgtccccagcacctggtgcagtggattgcatttaattaatccctctggataaaaagttttaaatgtaccagaccagcatcatcaggcagaatctgggcatggtattcaggaagttttctcttgggaatcacaaacattctttaaaaaagggcacatcccctgttacctaaatgccttcaagtatctggatgtttggccataagtacataaaacaaccagatgagtgattgtgtttttcagttttcctctggatccttctgccacctattccctgggacccctcggagacagtgggcaccactccccattcctctgcccacagattgtcccggctccctgtgccccttgctgccctgctagaaaccagaaattctaactttgcccctctgaggctgtgaaaacacagagtaaaagtgggaagagccatgagctagcagattccacaaccacagacaaatctgagcatggcggtggttaatagtattgggaaagatggctgagtaccgtggctcacgccgaaaatcccagcactttgggagaccgaggcaggcagatcacctgaggcttggagtttgagaccagcctggccaacgtggtgaaaccccatgtctactaaaaatacaaaaattagctgggcgtggtggcagtcacatgtaatcccagctacttgggaggctgaggctggagaatcgcttgaacccaggaggtggaggctgcagtgagccgagatcgtgccattacactccagcctaagagacacgtgagactccatctcaaaaaaagaaaaaagaaaaaaaaaacactattgagaaagacagtgtaagcttgtggtacgtaaatactctgtcttttttaaaagttgtgtgtagccgagtgtggtggtgcatgtctgtagtcccagttagtcgggaggccgtggtgggaggattgcttgagcccaggagtttaagaccagcctgggcaacatagtgagacactgtatctacaaaaaatacaaataattatctgggtatggtggtgcatgcctgtagtcacagctactcaggaggccaaggcgagcggattgctggggcctaggagttcgaggcagcagtgagccatgatcctgccactgcactccagcctggctgacacagcaagaccctgtctcttaaaaaaagtctgtgcaaagtgtacgtcaaagccacactactgaatcataaaacatcggcagtgcccgcccaccaagggcatcttctcagcaccagctccacattgtcctatgagtttgagtcagaggtgcctcagaggcccataaggatgcctgtcaaggtcttcgcagaaataccaaaggcctggcacatatagttaaggaaaatccaccaggaggagatggaaaaagggcaaggtaaagaggaggaagagaggggaaggtgacggatagggctatggcagcagagagccagcaccagccagttgccagtcagggccagggcaaggcagccaaggaggcagacagaagtaagccccttctttccactggagttttctctttcctgggaatttcattgtattttgttgaaaaataaggtgtgaaaatacaaaacaaaaatatcacgatccccccaatccacaccatatacaaatatatatactcaaaatgtattaaagacctaaatgttatagctaaaactattaaactcctagagaaagacataggtatatatctcatgaccttcgattaggcagtcagtggtctcaagatgatagcaaaagtgcaatcaacagaagaaaaatagataattggactttagtaaaattgtaacttctgtgcttcataggacaccatcaagaaaatgaaaagatagcttcagaatggaagaaaatattttcaagtcatctatctggtaaggatttgatatccagaatatctaaagaactgttattttgttgttgttataactcaacaacaaaaagacaaacaggcctgtttaaaagtgggcaagggacttgaatagacattatccaaagaagataaacagatggccaataagcacacacagagatgctcagcatcattagccattggagaaatgcaaaacaaaacccattgagcatgcacatcacaccactaggatggctgtgaccaaaaacaaaccctgtatcaataaaatagaaaatagcaagtgttggtgaggatgtggagaaatatgaatcctggtgcattgccgatgggaaggcaaaatggtacagccgctgtggaaaacagtttggcagttcctcaaaaagctaaacgcagaattactatatgatccagcaattctactcctaggtatatacccaaaagaattgaaaagagggactcaaagagaaacccatatgccaatgttcatagcagcattattcacaataaccaattgtgaaacaatccaaatgtctaccaacaaatgaatggataaacaaaatgtggaatagacataaaatggaatattattcagccataaaaaggaatgaagtttggatacatgctgtgacatgaatgaaccttaaaacattattatgcttagcgaaataaccagaaccaaagaacaagtattatttcactcataggaaatatatagaatagacaaattcatgggtacagaaagtaaattagaggttaccaggagctaggggcaggggaaaatagggagttgatgcttaatggttatggagtttctgtttgaggtgattagaagttttggaaataggccaggtgtggtggctcatgcctataatcccagcactttgggaggctgagtgggtcacctgaggtcaggagtttgagaccagcctggccaacatggcgaaaccctgcctctactaaaaatacaaaattagctgggtgtggtggtggatgcctgtaatcccagctactcgggaggctgaggcaggagaatcacttgagtacgggaggcggaggttgcagtgagccgagatcatgccattgcactccagcctgggcaacaagagtgaaagtccacctcaaaaaaaaaaaaaaaaaaaaaaaggtttggaaatagtggtgatggttgacaatgttgcataagtaattggtgccacattgtacatttaaagaagatttaaaaggaaaactttgttttatatatatattgcccccattttttaacgggctaaggatgtaaatagacagttcaccaaagtagatataaaaatggccaataagcacatgaaaggattctcaacatcattagtcatgagagaaacacaaatcaaaactacaatgagagaccacttggtgatacccacgaggatgactagaataagaaagacatgtggtagtaagtttcggcgagcatgtggagcagttggaaaggaaccctcaacacacagctggcaggagcagaaactggcttagccactttggaaaacagcggacagtttcttaaaaggtcagacatacagttaccatatgacccaggaattctactttctcttaagtatatgcccaagagaaatgaaaacctatgtccatataaaaacctgtattgaatgtccacggcagcatttctcataatagccacaaagtggaaaccagccaggtgtccattaactaacaatggacaaaatgtgacctatccatacaatagaatataatttggcaataaaaaagaataagtatggataggtgctacaacatgaatgaatcttgaaacatactaagtgaaagaaggcagtcagagaagactacctattgcatggttccatttatacattccagaataagcaaatctatagaggcagaaggtagaatagtggttgcctaggtctggagggttggggaaacgggagtgacttgctaagaagtatgaggtttcttttcggggtgatacataccttctttttttgttgtttttgagacagtcttgctttgtcatccagcctagaatgcagtggtgcaatcacagcttactgtagcctcaaactcctgggctcaagtgatcctcccactgcagcctcccaagcagctgagactacagctgtgtgccaccacgcctggcttatgttctaaaattgattgtggtaatggctgtacaactctatgaatacactaacagccactgaattgtacacttaggtaaactgtatgtcatgtgaactttatctcattaaagctgttatcaaaatcacaaacctaaaaataattttcaccaaaatgatttcccacaaataacaactaaagcgatgtttcagtcattaactagaatagtttttaactttttattgtggaaatattcaaatatatacaaatgtaaagagagtagtataaagaactcccatatactcatcaatcagctccaaaaattgtcagtgttttagggtgctttcccccctacactttattaaaaaaatttcaagcatcagaaaagttggaagattgtacagtagaaaccaatatactatacacacctcctatattctcccattaatgtttactctgcctgacttaatctgtatctgaccatccattcgtccctctctccatccatcgatttgctttgtattaatatatccatttcaaagtaaattgcagacagcagtacacttccccttaggtactcctgcatgcatatgaatgactagagttcaatatttgtttacagttctctttgtgtttttgaggtgaaatttatatacaatgaaatgcacaaatttaaagtatatgttctatgaattctgacaaatgtataggtttgcatgactcaaagccattgttctaacatctttaaaaaatatttttaattggttggagaccttcaaaacaaattcttttcataggtttattgtgttttagtgttggagttttttggtaaggttttctctttttcaattatatctctgaagggcagaaataccaattatatattataagctacccatctatacacatcctcagccttcttagtcttttgaatgaaagccaatttagcatttcactataaacctgtgttttaatgtatgtttcatgattaacatatcaaaaactttgctctgccaaaatctacattttcagagtaaacagggtgcctggcatgtaacgctttgtaagatgaatcagcacatacaattttaagccagttaacctacagtatgctcaatattgttataggttttctttttttcaaaaacaggcaaactaagttttctttttcatgtggaaaaaataacaggatagaaaactcaacactcaccttgcctgttgaaacatactaccaggttgtaataatctgagaattcatttgcctttttttttcagtgcagtcactacaacagtctctgatcattattacagtaaatttttacacatttatgagaaaaatccaatataattgactggtgaggatggtctatgtcctaagcaatgctgtttttaaatacaaattgataaaaagttatatgaaaaaggccgtccttaaatagaataaattcgttccgttttttattttaaaccaaacttgatcttgacattttcaataagattttcatagagatgctcctggggccttctgctaaaaatttggaccacttcatgcccgtgacatgacatcattttacacattagatgaaatgaaaatcagatgagatggacacattcagaagggatagaatttactgtcgtttttgaatacgtggcatggcaattgccttttgcaggatgaaaatattcattgtacttttctttcatcacaaatgttgtggatctccctggagtctagaaagtctttcctatttcttaattaccaaatcttgggtcgcacatagctttctcgttgttcctgttgcacccagggctgtctctgccatttcctctgaaaacaactatacattaacattcaaggtttgagtcgggggctgggaggcgaagggaaaggtgataattcagatgttatgaaactgtgataatgctattatttaaggcacttacttgggtatgtttatactttgtagttttataaataagcccaaggggctcctcttggttgtcacaatcccccttgaatctcgtatcctgtctgtctcatcctatccgacagtagaattgatgccgctctaatccctggaagtttggaactaatgaactgactgctgagctgccgccacggagcttggtcccaaactatactgtacttcacactcgatttattctccagatggcgagactgtgccgccctgccgcgagggaccacctcttccactggagtgtaaaagtggacggatgttgttttctttgcagatttgatcattctgagctagaaacttgcgaggatgattagttattagctttaatgggtgccaattgaaccaactgcacgcatattttctcctttaatttcagagtctgcaggttttggtgatggttgatttctccgctttcttacgtcaccagagcgtgtctcttccccaggtgataggaatccagtctctgaaatcatagcacgccttggttcctggcccagacagagtcacctaatacggtggcttatggataaggacaagtttattagccactggtccactgcactgagcagcatggcacgaaatatcgattgaatgcggcaactttgggaacaccattttttagaatgggggcctgcaaagattgtaatctgtgccaacttcctctatgacctgggcagagtccacctctggatcaaacatgatccagaacacgctatggtaattagtctcttcgaagttctaatgtaactgttgataaaggccttaattccattattcagtcatttccagcttgtcagatcttgggggacaagttcattccacagtgagaatggctcaccaaggctgtcctgtagtgttaacacatttagaatgcagtccctctcaaacctcattttaaacaacctgtattactcctaggatataaaagcccccataaaagctctttttggggtgaccgcttttaccttaatttcctttttctccttcctccaggaagcacttacctcccaatagtcgtagcaggtcaccctgagagcccttctgagagctggggtcagccaggcagcctcttgctaatccacctaagatggatattggagggatggtcagagccaaccaggagccaaagaaagagagaaagaaaaagaaggaaagtgtgaagcgtgaaggatgaggtggtggagatgagagagctgagagcgctgttagcaagaagtacagtgtgtgtggcagagagagggaaaaagagaataaaatgaacagaatttctttcttttcacaactgggtggactgtgactctctcgaactgaacacccagaactaaacttaattgttcttagaaactgccttcctcccaacccaacagatggcatgggcgtgtttgctagcacagtcaaatacttcaccctgaaaataccaaaaagaaaaaaaaaaattcaacatgctcgctggttggggtaaattcactgaagttgttgagtgttttgggatatataccagagggatgcacacttggtttatgtaaattgtaacaagcaacagccggttaataagggtgtcgtatggcaacttacctcaaaagccatcctctgtttttggaaatgtacagaatgatgaagtgtaaagagcttggtttccattctgagccaaaattttttaaatgctgagtattcactgctcattattataatatgaaaagtactaatcagattatgcctaaaattggaagtaggtacttcatttgcagccaatttcacaagggccgaattttgctaagtaaactggaatgtgctgaaaccatggcaatccgactttagataaaaatcaaacaggtttagaacatgagctttgaacaaacaagtcccttcaaatccaagtgaaaccaaacagcttcaagatcagattttgtttgacaccagccaacattaacaatttaggaagttgatgttgccagggatcctgcgttcttgagcacacatgcagattagaggatggagatgatgactcaaataatttaagctttaaaatgcagtatggcctaaaaaactgagtgagttcccttcaattttccattcatactgtcccagtagactctttgcaaggctgacttagctattaaaagggaacctggaagtcacattgacaaactccagcaatcttatctcgtttttttgtagctgcataggctacacagagaagaacatgctttaggttctccacagccatggatctaaatgtgccttccaaaaagctgaaagtatttcagttttttggtttgtttgttttcgcttttgagatggagtctcgctctgtgtcctatgctggagtgcagaggtacagtctcggctcactgcaacctctacctcctgggttcaaacgattctcctgcctcagcctcccgagtagctggaactacaggtatgtgccactacacccggctaatttttgcatttttagtagagatggggtttcaccatgttggccaggctggtcttgaactcttgacctcaggtgatccaccccctcagcctctcaaagggctgggattacaggtgtgaggcaccatgcccagccagagctcaagtatttctcccagcagctctagacagctttagagccaagatactgagccaacttctgctcttcacctttaagattttcgtatttagggccgggcaccgtggctcacacctgtaatcccagcactttgggaggctgaggcgggtggatcacctgagatcaggagttcaaggtcagcctggccaacacagtgaaaccctgtctctactaaaaatacaaaaattagctgggtgtggtggcgggtgcctgtagtcctagctactcagggggctgaggcaggagaatcacttgaactcaggaggcagagattgcagtgagccgagattgcgccactgcactccagcctgggtgacagagtgagactgtgtctcaaaaaaaagagaagattttcgtatttaatggctgtaataaagaatgcatggtagagcaagtgggcgagttttatatctatggaataaaacaaaggtatgatgtggaaccaagccattgctggctgcatcatctctgactttagctagtctgagctctctcttgcttttgtctaagttggcctaattattggcagatgaagctctgtaaatcaggacttcacagagcagtcctaaactgtcttaggtactcttcccatctgacccgacaactctaagctaccgtttcctcacattgtttaactcagaccacatttggaagcattccttgcttctccccgctcatagacccacatctgtctggtttaaatctgctgtcctgggttgtcttgttgctgggacttagactcaatatttggcttaaataattcttttttgtctctgctttggtttgctattttcctagatcagtattgcttttcaaatggttatatattattgagaccttttttgtaaactacattcatcagcagtgagaagctttaaagttttattagtatcataaaaacccttcccaaatgaaactacttttgataagtgttcattctgacaatgagaatttgttgagggctgttggcaagttggaggagttggcttttgaaactgaaattggcaggaagtaatgacccccagtgctttctttctcttgactccagcctcaccctttccatgcacttctttctctccccaaccccaccttcattgcccccaagccaaagccaagaaataacatacttggtttcatatagtttttctggggacaattcaaatactgaagcagactttcagcctttcagcttttctgaactgtggagcaaagcctgtcaagtcaaagaaaaaaaaagtatttgtcaagcacttcatgaagggattccttgccttccacctgaagaagtgggagcttttcttgtagtacacattgtcagattcctgtgagcatcttcttaattgaatgtcaagattcaactcagttgcaaaaaaatagtgagtaaaaaaagcatgatgcctgtggaaaaagaaaaatccttattttttccctaatgtgaagaagctgacagacgagatggccacaatctagatgttagccaatttcttatgtttattaaatgagaaagtgcagggaaagaacatagaaccatgcttagcacttaatgctcaatcagtgaaaacttacccattaactattttccccttcccattgggaagtaatgctaatgagaaagacgacacttccatacagaagcacacccatgtgcactgcggtgcgtctcggctatgttatagctatcgcgaatgaaacctaaaaatcaactgctcacctttcagactggatgactcctttcaaatattatttatttggtggacaggaaatgtgtagatagaataatggtgctcagactctgaatccacataacagtttcatcaaccatttgatggtgctcccctcaatgataaaaataaacaataaactttttattgacacttacagaatgaagctcgactgagaattgtaaaaactcttgaagacattgatctgggccctactgaaaaatgtgtgagagtcaactcagtttccagtggtctggcggaagaagacctagagacccttttgcaatcccgggtccttccttccagcctgatgctaccaaaggtggaaagtcctgaagaaatccagtgggtgagtagctaatgctttgccttaagactcaggagcagctaaggaggagtagcaggaagaagggatctgggtgccacaggtttggaaaatgcatgcagagagcagagaggaagggaattgagaaaaagcagtaagctcaagtatccgtttcttttacacaaggaaaactcgcctttgcccaaagtgttctatgaaacaactgcacttttgaaatgatgcttcgcttcctaattggatgtgtggtttggccagaacagcctcctcagtagccctcccagagtaatccctggaaactaggttgcccgagaatctcatcccttcctccaccctgcccggccctaagccaaggcctccacctggaagagcagtgacgtaaatggcccttactgagattcatctgaaatcatcccaggcagggagggcacatttgccgcatatgaaaaaatgaacccaaagaaggggaggaaaaggtcactctttagggcaactggaggaatgaacaggaagcttttaactagtggtttcaattagcactgatattatttcctgaacagttctctagtgcatcctttttaaattgctgacaggtgtgtttgtgtttcatgacagacttttcagccaataaaaacctgaaatgtaaagtggttggcatgtcaaattacttaagaaaacttttgaaataggcctaattacactatgattgttttaattgacaaagggtggaggggctagattttatttgagggtcgctattattctgcagatctctactgaataaaataacatttcactgtgttgttctgggacagaaaatgtgtcattctgggccctgtgaggtgtgaaaactggaagcgtttgtggtcggggcgagtgggcagtggtggtttcatggaagccacatctagtattatctctgaggctgtggctgccaccacagcaataccctgagttgttgtaacacctacgaaactgctcacctgctgaatgcacccgatgtgtgaggtctgcgttgcccagtgccacggccactatgacatgtggcttctgagcattgaaacgtggccagcacaaatggagatgtgctggaagtgcaaaatacacactcgattttgaagactcgggactcactgaggggacaaaaagagaatgtaaactatctcgataatttttatattgattacacattgaaataatatttgggatctattgggctaaatacaagatactattaaaattaaattcacctgtttcagtttaccctcaatgtagctacgagataatttaaaattattatatgtagctgctgctatacagtttcttttggacagctctgtgttggatccttcttgaagacccgtattcaaggaccagttatttattgactaagctggagttcttctctccagggttaccctcagaagctgggagatactagttaagagtatgttaatatcctggagggtcctgagcccattcagatatgtcttaagttgattgaaatggactctgaagtcactgttcccttttggtttcatagttaatgcctatttatcaccgttattacctttaacttaagatgggggagggggagacccagccagccttccgctatggcttctgttcactgttttaaatccttggaagtgagacacatacagaaatttaaatagaacttctagttaacagaagtccttttggctgtttattttttcctctccgtttgtatttatgcgaagcataaaacccagagcctgatgcacaactgaaagatgggcttacttgttttcttttgtgtgagaatctcttgctcgccttttgtcgctagtgtgggttcttgtttgactggcacggcttattggactataacaagcgtaaccctgcctcctttgtcatgggacaattctcccacaaatcccgaacagtgtgcattcttccaacacactattgggtgtgcactggaattgaaagaatcgctgagccctgctacttcatctcctccccaatctctttgtgatttctcccccttcttctcctccccctaccccagtcccctccacctcgctgaaatgaacactttaccaggccggaaacatttaatcgtctccttttgaaaaaattaattgaaacttctccactagttaccttttgtgttagtacttagtgcaattttttaagaaagagggggaggaggaggaggaggaggatgggctagaatatttaatttttaaatgcccctattggcttaaaaacaaaaggcattggggtgttctcactaagaacagggaatatattgtaaagtgttgacttggttttaaagtccatgatttttgtagttataactgtcatcacaaagaatggggcaagtcacttcacaagttttcttttttaatgagaaaaaatatccctactacatttttaacaccaaaaccactaatactgtgctaccactttctagcataaatgagaaataaattatattttattttcatctacatcaaatactatacattttatccccttaaattgtcaccccctgctccttcttgctattttggttgagttattccttcccttgaaaagttactaaggaggtgatgatgatgccctttgaagggggggcagtgggagcaactgggaataattcttcattactgaaagctgtgatttattttagcctaattgtaaagttactgcaaattgctcaaaagctttttaaagatcccagtgattagattttttaggggggtggtgcaccggcaaggagggggcagctagaaggggaaataacacctctaatcccgcttctggtaaataggctgccagcttttcaaatgagtttcctttctattagtcagaatattatgctaagccttaagcattagtttttttatgttgccatagcagccttattcctgcagggtggtgacctgtgatgattacagtacaaagcttatagggtcttgaaaccccctttgaagatgaaaagtctttgatggtttatatttatgcaaatctcttagatatgatttacccaactgagactgaatggagagatgattaaaattcccttttcctttgatatctattaatggctgaatattccttaaatttaaaatggatatatatgttttcatctttatttacaaaaatacctttatcatacctgtgtttcttctctatctatctccccacatcttattagatctagatagacataatagatttacaatttagagtgtgtttttttcccccttttgaagagggggaggaatctgggcaagagcttttgtatgtttccagatgatagattttggaatttgggctaccccactggcagcacagagctagctgtgaactggtctcatggaaaaaattggcgagctttggtcttcaaagaattaaacttcctttttaaggtcttcctaggtaagctaaaaaattatgaagaaaaaccttctgaacaaagggtaatggtgctataatgaataatatggactccacgtagaaggctgctgaacagttgcactgatgtcagtgctgggcacgaaacaaaaacagaatggcaggtagaggaagagttcattgttttaagggcctaccatttgcatttaacgaagcgagggcaagaggtcttaagtaaatgcgttttcagggaaagcgtttatactctctccttccagttctaactcctaggcctcaagttgctcctttgggagaaaaaaattgtaatgcttaggattttactatttagtttggtgggaacttcattacctttttctttggactttcttcttatttttttaaaaaaattcttttgtgtggacgaaagaggcttggatattacttcctcaggtcaaagacttaaatactacttctgggtctacatttccgtgattgtacattttttccccactaatcacctatgacacttctgattttagtttgcagacaaattttcattccacttaaaaggccgaaaacttgaacaaccaatgaatttaatcccttttgtggaaactgcaatgggtttgctcaattttaaggtaaggaagccataatacggttaataagttagcattttatttatcacctaaagagaacttttgctttcaattttaacatcttcttaaaatgtgtttctagaaagatttataagcaaaggaaatgttgagcaccatttgttatctgtaatagtccaaaaaccaggttgccagcatcttagaaaacaatgaaatcagttaggtagaaggaaaagcttcccagtccaaaatatttaaatgaagcatttgtatattcctagtaacaattttaactaatcactgtgtaattatatgctttgaattattgcatttatagactaaatgtacatgaaaatttgtcacccttatgaattaactttgaaatgttcttttctatcaaatgtcttttcagtgggaaatgttctgccctctctgtagcaacattatcagtaatgtctagcagagaagattattgtttgtaagttcatgcacacaaataatttgcagtacagtttttcagtttgccacattagaatatcttctaatatacatgcgggaatattggctgagccaagtgttttcagccgttgtgtggttgcactaaactaccggtcttaacaaattcagagctagctcgttttttctcgtttatcagggggcatttatattattttccaaaatatgcctctcattccacctgacctgcgaacatcaatctagcaccccctttcagagttcctagattcccttcccccaccccagcccccacagagggcaggagaaaagaaatcactaaaaacaacagaaaaaacatagtcgaactgtactggagagagaatgtgtgagcggcaactttgaggccttgggatgtgcagaaggggtcgagtgcaaatgtttggggacctgcttcaaaccttgtcctgtgagcagcttgtttacacaactaaccatacattcttccagccagccccagaatcctgagaatataatcaaaagcatatccctaagatgcaaccagattcatccagtgatttaattttaagcactgcttcgccattttattccataatgtacttagaagcacttacaatgtctgaaattaatcaacagtgtccccaccggttcctcgtttctttcccacccacgtatattattagcaggttatatctccacctttcaagattcacggttatgtctacgacgaatggtatttgccttgactttcatatataaatgtcgaagttgctttatgaacacatcttggatgacttgttgcatttttattttcccctccggagttgcaggtttttgtgctgtctttaatcctgagaccatgtgcttgatcctaatgcaaataattcaattagtttgattttaaaattccttccttctcccctgtggttttacgagagtctcttaaagcaaaaacgaattctggaaagatataaataacttatagtgcaagcaaaatgagttaactcaaagtttctccaaaaatgagatgaactacaatttgaacattataactatattcatataatccattaaacaaagcaaatatatacaatatacttatcttggatgatattaaataccttttgaaaggggtaaatttgggctgcgtttttaggactgctttcagccaaactgtgttaagagtcaggtcgtcctgttactgaaatgcaccgtgcctcttccctctgacgcacgcgtttccgtgagacttagttctgttctgctcttttacaggcagtgtgtgaagaaaccctgaaggtcgggcctcaagtaggtctctttctagatgcagtcgtttttggaggagaagactttcgagccagcataggtgtcaaagacatctctctctctctttttctgtgtgtgtgtgtgtatatgtgtgtatatattttttctttgcccctcaaggatggacatttacataacaatgtatatttgccaaccatgacaatggtttttcatgacaatggaatggacactacttcctgataatttagggctcctcatagctgccctgcttctagagcactgcattattacttctgttcatttataaaagacacgagcaatagaaagcctgttgcagccccaggcatgctcaggaatatatggcatctcctttgctcctaataaatatattatgtgaacagcctcaccgttgcttcagtattttgttttcatatcagtctgtgggctgtctagatttctaacgcaaatttaaggcaatttcacatttgccttaatgaattgttttctacagaatatgcggtaggtaaatattattttaaatggatcttaaatttctcttacaatatgtttcgaactcttagtattaaatgtgctgattttcaccgattctcaccatcccttgtgagctgcacttgaggggtctgcatgtttgactggagaccgtgaagcatttagaaaagaggccgaggccacagaaaccagccccagtgacctgaagacaggcactttccctaggcagggagtggcatgttccaaatgtaaacagggacacttccctcccctcagggtgaaaaaactgaatttatttgaatacgagtctttccaggagacttgtgtatccaacggttcagcgggctacagaaggcatatcgatgctttccagccctctcaaaacaagtgccctcccgtctccccaagttctccatccagacagaccctgaagctgaagcatttggctcagaacttcagtttggacagggcaatcgcagcacacacagttctgtgcttgctgtgaaacacgaaccattgccctgcatagctgctgggccaccctttgtggtgctgtctttggactggcacttttcaagcgatgataagaaggaaaaaaatatatcaggagtcccttgcgaccctgacccagcctcccagaatggggaaggggccttctcttaatgcaggtagaagtaattctattgaaagatgccttgtcagttaaacagacacattcgaggtttaacttggcctccacgcgtccctgtcttcatttgtatttcaataattttattttgcggaggagcaatttccagggaggtttagatatctgtacaaactgaggttttataataaatatctgggtgcggtttccaaagttaaagcctcctttttctgttaacatcccattttcaggtgcaacaagtagtaaagaaaccctggatattctctacgcccggcaaaagattgttgtcatagcgaaagcctttggtctccaagccatagatctggtgtacattgactttcgagatggagctgggctgcttagacagtcacgagaaggagccgccatgggcttcactggtatgattcctgtcttagaaagcagtgtctaaattagcaagcattccagaaaaatagaaatttgacccgaaaacacccctaatctcatcagatatctcccatacttactccactatttgaaatatgagcaagtcacacaggggaagaacttgccagacacattgtcatggttttccttggccctgcaagtcaacaaatcactcattttatttcctctttatattagttgcttttttttttttctctccatcctcttaatcattttgttgtagtcttggctgacctgtagggagggatgaggctgctcaaaaagtgtttttgagtgaaccgccataagaattttggttgatggacagaagaaaaatctcctagaatatccaaaatttaattcatttctgaaaaaaaatgttggtgatattgtctttggtttttgttttgttttttactcataactagttttttgctcttctgccactccaagcccctcctctctctcccacctcccagtaagtgtccgtgtacctggcgacacctacgggcataggctggcactaggatcagcgggtcccttgcagtccggtctggggcacaggcgggtatctgttgattggtgtgcctggtcactcaggtccccatgagccaggggagcaacagaaaattgtgtttttacaacagagatctatttttcgaaaaaccacaataggagtctacacacaaacatacacatggagttgcacacacacaaactgacaaccatgggaaaaacacagtgcactccttcactcttacctgttcttctgttgttgaaagttctaagaatattaatatcagaaaggcacccgaataattaggaaaagagacgagcatcctgatattcctgttataactgtttttgaaatatatctaggtagcggttaccgaaagaaaggtttcataaagcaggcttaaacgtgaaaaatatcttaatggatgatgatttagtccaaaataaaactgaatgacctaagaagctattctagtgttatattcaaattaaataaagctctgagtttgttcttgtgttttttacacaaagagctaaaataaatatgaccccccccaattttttaaataagtgtgatctcgtatagggaaatactcttcaattatctgaactattaataaacgaattctccctgcgtttcatagcgactgaggaagaaaggagtcctctgccacatccatgcaattgtgcttgttcctgcctctttccaacggctggttaggatgtgacccaaatggaaaagttggagaaaaactccatgaaatttatctaatagaccctgatgttgttggcctgcaatgtatggcactggctgccaggtggccagatgttgctctgaaatgggaactaattcgataaaaaagagaaagcactgcatcgacactggcccctccaccatcacccagcagaatctgagtttcctctgcctcctctggggtaaatgtttgccccagaacttctctgggagctggagagtgtctccaagatacaggactgaattaacttggcccctaattcaatcgcagaagacaggctatttcaaatcaggtttaaatttctagactgtgcccagctcagcacgagaagcttatggacctggcactattgtttctccacgacggggagtattaaatcgctaaaaaaaaaggggggaagcgaggataatgggaaggcacagagggcacagtgcccattatatattcaagggaacgaggccataactagggagccacacttcgtaggcagtttgcaatttttagaaagtctttgttgccccaattatatttctgcataccaataagaggtaatcaatctgataataagatagattatttgtagtcattttttaaataaatgttttttaatgagtactttagaccactcaggatgtttgtcctagttgtttggcatttgattgccataccttgggccttgcacaaggagaagaaaaagaaggaaagaaaaaaaaggaaaggaaaagtggggaggagagagggagggatggaggaaggaagacatgtcttatctgaagcaggtggttgaaaggtttaaaatccaatgaaagtattgtgttatccataacgctggtaaggaagactaagtctgtgctataaggattgcctttacttttaaaaatgatacatatttttaatgagttgtagtttttaaaagttagctgtagtttcttttctgcggtcgtttcccagagtcacagtccatgtcgattgattttaaatcaatgcattggctgtataaatggccattaactttaggaaattttttataaaaaagaaaccaaaactaaatcttggaataaagctttaacagctgacttagtcattacagttactccagtgctacatgctgagaagaaagattataaatatgaagcactataggttttcttcttttttgcagtctattgtagaagacaaaaatgacaccatcatacagttacctaaaagacttgacaggtattgatttaaagcacgatatatcaagcggtactgtaaaaaggatttcatggtcataaattttaatgtcttccaattttgcaccctctcagtaacttgtcaataacaactcttttgtataaaatatttgcctggttcccacatgccattaaagtctgctatacagttgttggaatatataagatgtgacaaaagagaacttcacatatgaacgttcacacatttctaaaacctaacatgtatcttaaaattagcctcattgcccaaatataggtactggaggatggagagctagcagtgatttcacagtattttaagtagtttatgttttgctcctcaaattatagtgcatgtaccaagaagttcccatgaaatctggctttttacgcattggtgtaaattatgtacataaattatgaaattcagggctaacaattaggaggaaatgactaccagaactgacatcctttattaacaatatcccgacaactattaaattacttaaatataatctcgatacctactaccgaaaaaagccctcttgtcatccctcatgttattcgttcccagaaattattcctcaggtaatttaaggaatctttacttatataagtgtttaacattttattagtatgctgacagaaaagaatgaaatagcaatgtgaggatgttttaattatgccattggaaagaaaagatattattatatttatccacttaaactcttttacatgaaacactaaaaatatgtttttacaagcatcattccttttttcattctaatagaataatgacaataggaattgacagcaaggatataaaacatcaaggatataatttctactgtctaaatgttaaaataactatttcaaaagcaaagcaaactgatataccaacaaatatattcagcagagtaaatgatcattaagtgtacattcatttttaaagagccaattatgttcataactttatcacgtaacaatataatctcatcattattataacattaaattatgttgcattttattaatgatctgattggattctacacttccctgattgttaaattgtttttttaatgactgcattatttcacaaaatcctgtggctcttatctttgtgtgatgttttcatttaaaatctttcaactataaaaagaatcataaatctttttggaaggtatttctacagagataagatttcttctgggatatgtagggtgctataaagagggaaatacccagtcttgattctataagccaaaagggaaaatctgggtatatttttggacagagaaactttaagtatttattttttaatttttaaatggagtaatctaaggctgcagtgttcaaatctgccttctattttaccatactgaataaaatattttcattcaaatccaattttctattgggggttagaattgacacataaactgttcatttaaaagaaaaacaattaaatatactattgtaaagctgtatttgatagtaatatagttgtaatgactgcctctgtaagctttatgaaaaccagcagaccatttctaagagaaatcatggaaagaggtataattctacaaagaaagcaaaagacaccttataaaatttgagagaattctcatttaatttttttctacttcaactcaaaataatccctctaatttgcagacattatcctttaaagtcccagccaaagcagttattcaacaagctgcctagtcagcccacctgtaactaaaaataagagattatctgccctaaggtggcatttctataggatcggaaacacaattacttccattgttgtagttgtgcttctgtggtattctggaaaagcctgtctgattgcaggttttgtttgttttgttttgtttactcaataaaaagttttaaattagttatttaacatacagtctatgaggccttcaggaacctcacgcgatagaaacattttgtttgaacatctgttcgttgtttcgtggttccgatgttattaatattcttgtaggtaagcaggtgattcaccctaaccaaattgccgtggtccaggagcagttttctccttcccctgaaaaaattaagtgggctgaagaactgattgctgcctttaaagaacatcaacaattaggaaaggtaaatgttttgttaatgccttgggtgagagcagtattgaaaatattgtcgggaagaatgaaacaaatatgttgtgtgaatggtttaagaaaactcatcgtatctggagaggggggaaagggagggaacacaacattcaccagtgagaaaattgcttgagatagatttgccctgcccatgttcctaaatacttcactaactggctctcaagtccctcattttattcttttcataaaatatattggcagccttagagaaaatagaagtctgtttagtttttctctacagacttctatgcagcattcatatgaaaataatcctagatcaaagtgagaacaagttgtaatgaaataaacacagtttgactaaatggttcttgtggaggaaagaaataaattgcaagttattttaatttggggggaaaaaagtacagaaatctcctccggtttagtcatttaagagtgggaggttgtatatgtgtttgtaccaatttctggacctgagatttggatggaatggaaagcaaattaacactggagtacggttgttcctaatttagtgcatcattgagcctcgcgtttcctgctctgtgggtttctgctatgtaaatattgcagtggtaatgcacaatctgtctccactttgtgccagtaacacttaaattaggtgtcgcctgaaggaagattttatgctagttgcagcattgtcagttaattatcttaaaggttatttgcaataataccgtttgcctctttttaagaggataggagggaaagttacatttataaatctatcctagaggtaatctctaaactcagcctgtgacttccagaaggagtaaagttttgatacctataatgcaaaattacttaggagaaagaatattgaaaatttattacagttctgaatattaaacattcccccctgcaaaaaaaaaaaaaaaagaaaaagaaaaactggtttttagtggtgaccctgaacctgtgacatccatgtgagacatgtccctcgcacttttcactggcagcaaggacacctgaaaatcccaggacttgccaaagtgggcaacaatattaaatgggtcattccctaaggatgtccacattcaacccatgcacacatgggcacactcacacaccagcaggctcatctttgtacaaactcacacttaatctccaaaggcagaatatattacgttggaaatacccaatttggacttacaccaatttcatgataaatagcatctttccatttcccatcaacagtggccatcagaaaagtaatgcatttcatagaaacaatattttaagttgaccttgtgtttagtgtccatttttgtgtcttaaccccagatcaagattcccatgagtaaatctattcacctagaacgaagagccacggactctcattcacatgtccatccatccccttcccttgcatacctgcccacgcatacccacaccgaatgctctatacctctgctacaagccttgtgccagctgaggacaggcatgtcataaacacctcctggtgaaataggaaactgaggcagcatgtggaccattgaaacgagagagcagagttccagtctgggccagcactgtgtctatgacccatcccagctgggtttcacattgggtagcatcaaaggagggcagttggcattgtaagcagataggggtgtgggagagtttaccctgaatttcagtagccaacaaacagaagtcaaaccagaaacacttgctttgctcagcatttaagtttttgaatgaggaaaatggcccttttccattgtatcttgaaaagcgttgttccctgggaaaacgctcccaaagttttcacaccttttgatgatggcaacttaaatgttcaattctggactttttttttttttaaataagaaatgccctctcgttggggcataagctctcacaacagtgtggcaggatggcttttcttaacacagaaccatagaaattagagcagaggggagactaactattaggtaatttcttccctgccccatttgtggaggtttgtttcctatagcaaattctcctggtgttttgtccagcaaggttgaaatgattcaagtaatggggcttccagtagggacatatggttattttatccagttagcatgtttctttcactttgcctataaactggccggtcacagaaattggatctgcaggtaggtgactctggatcttgaggggatcttggggtttaaataatgtgggttctgtttgtaaagattttgtgtaaataggttgcacaattatataaagtattgcttccaacaaacatctagtctgttttatgtcaaatgtgaatcactgatgaacacgtgaaccctcagatattttgtccaaagcacagatgactctctcaaagataggaaactgatggtttgtgtcctagtgtgacagtcacaaatttccaaaagacctttttcctccctctgatgaaaatttcattcaagtaatgcttttaagtagaaatgacccaagaaggaaaaattatgtatctttgcttttctgcacttcttcctgctctcatcttaaattatatcctgcccaaacataaaggtatagctgaagttcacagttagccaaacataaaggtatagctgaagttcacagttagtgctgagccatttgtgttttctatagtaataatcattactattattcaaacataaaagctctaccctttcttcctgtcctgtccaaatggcaaaattcatgggactacttagaccatgagcagataaattattggagttcagactttggtattacagaattttggggatgtttattttaattaaaagtcctaaggaaataaagtttggtgtccttggtataatgttggttgacaatcactttacattaaaacaaataacaatcagctcatatcatctgtccctgtttggcaggcagcgattcttgtggctgctttgtttcaggaaactgaaagatattttcaggctaaaaaattttgcttggcaccgtagtccagtaatcagagttagggctagagactgacactggggactctaggttatcttatcttattaaaatctgttggaaaaagtttaaagattccaaataatctctgctcctatgttaattcccagaaactaaaatgtttttaatttagctgacatcagctgtaaggtttccatccacaatattaatcaaactgactttcttccatccttccagaaaaatgttttttgagatacaacgtgcataccattaattattttagtttcaaattatttggtaaaatgctttaggcaggataaatcatttccacatgatttgttttaaatttataaaggattttcttaaaagttaattccatttttatgtctttttttataataatggtgattccattaatatttgaaaattcttcattcagaactgaatttaatatgcttattaaagtaataggatttcaacagttcttttttatcaataaagaattttatatactgtaaaaattggatacttgaaaacatctcaagcaaataatcatctaatattgatatcaatagaaataattttatataaacacatatagcatacatgtttatacaacatataaacattcaagtatgtatgataacgtgtatttcctcaaatctatattatgagcttagtgctaaagtttttatctttccatattcatcactcttaggcaaaaatgacagctaaaggaaacagtcagttgcttttttaaaacagtcactaatcacaggaaatgttaatataggaatttactatttctttccaaatggagactctaacagaagaatgcgaaggaatagcacaatatattacgtgtgtcaaaattttaaagatactctgctagaatattcatattttgcagtatctggctacaaatatggctttgcttcattttcagttttccagacattctctttgattcatatcatggctgtacgtgctttgtttggttttggaaggattttgtttggctttttcaatatttctccttcgttatagcttcacaagttggctaaagactgaggaaggggaagtattcatctttaaattctaggttcaattaacaattacaaatgtcagaaacaagatcactacctggcctaacaactgtaagcatcacgcaaccaacattctcatttcactcaggagagaaaaacagtgcaagctgataagttcacattagtaagcacatcttctgctggaatataaactggaaacatctcttaataaagaaagaaaaaggaaagtaagagtttttttccttatgtaagtctcttcatctagaaactttacaaacagtaatacatccctcctcccaaaatattgaaagcccatcattttcataggtgtctgattgctgctcgcacacctttcatttctgtttccaaatgcaaggctttacaaaagaaatattgcttggtccagatggccttctagaagcctccctgagagaactcaggagaagtttctctagccaaaaatattgtttccgcttattcaagtgccagaaatcccactgccactctttcacgcagatcaaataaaccatctaaagacgtggttgttgtctttgtcaactgaaagggttgattccactattagacaacagtgtatcctcccacacccatccagcccacgacccacagccttccctctggatttatgagcaggaacacgaaaatcagagctgagaggtttgtagtgaaaatgaaagataaagggacataactctgttttagagattcttagtaattgcacttttctctttatttccctgctcatttaacattttcagaaagatcggccataattttgatttttaaaagtccagttcttagaaaatctgagtctgccaatgatgactttaagattggatggattaacacaaaattgcgaaattttaaacatttaaagcaaagtaatgaattgctacaaagtattgaaatcatatcatattctatttcacttttttttttttttttttttttagtggcaaatggctggtttggtattagaagataagagtgtttttaataggccgggtgcagtggttcacacctgtaatcccagcactttgagaggccgaggtgggcagatcacaaggtcaggagtttgagaccagccttgccaacatagtaaaaccccgtctctaccaaaaatacaaaaaatcagctgggtgtggtagcgggtgactgtaatcccagctacttgagaggctgaggcaggagaatcacttgaacctgggaggcaaaggttgcagtgagccaagatcacaccactgcaatccagcctgggtgacagaacaagactccgtctcaaaaaaaaaaaaaaaaaaaaagagtgtttttaatgtagattaaatcggacaatgttttaaattgtttgctttgtccttaatttataacacactcttaaggatattttaatcaaaatattctttatccaggttcatatttttccgggttttatttgctcaattttgattttaaatatgtcattattttagctggatgaaatctcagaaatcttttagtcagatgccttcagtttatgacttaatgcacagaaacccagcaaggcttcagaagctgcccagtatcactcacagccaaggtggagagagggctgcgagcagaattcagggcttagtttgtaagtaaagatatggaatatcataaatgtgtcttcagttgaatattacagtgaatacccacactcatgaccaaaacgagatagagccttaaatgcactcagtcacaatcaaaatctggatttgggtagttccaatgtatgtcttttcttgaggataagcagaaaccaatgaggaaagagagaaaccagggtctccacgtgccgttccccacacgcctccctgctcagtgctgccctgccctcatcccccagccctgccccaggaagccttctaggctctgttcactgcaaaccccacttcacatcattagttatcagtcgttcagtctcccaacatagattggaaactcccagagcaagcctggggagcctttggcagagaggccatatttactccaaagcccagtgtcatctcaaggacatcaaaggacaggtccccagagtcacactctcagttacacctgtgaccacacacaccccatggtgttcagtgcctatggcagcaagatcgaagtgatggccaggagaggatcattttgttccttggacacctttccctctctttcctcttcctgtatttctccctctaaggatggatgggtctgtgtgtgtatctttctgttccaccctcattttccttgccctgaattctccatttcctctttttctttacatctttttctttctcactacatcatctccacaccccaggccatccctcaccttctttcctgtagctaattacattagagactttcagagcattcttttatttatttattttttggttgtattaattaaagaattttgtaattctttttttttttttttttttttttaagacagtgtcttgctctgccagccaggctggagtgcaatggcgtgatctcggctccctgcaacctccgcctcccgggttcaagtgattctcctgcctcagcctcctgagtagctaggattacaggcgcacaacatgcctggctaatttttgtatttttagtagagacggtgtttcaccattttggtcaggctggtctcaaactcctgacctcatgatctgcccacctccgcctcccaaagtgctgggattacaggcgtaagccaccgcgcccagcccagaattttgtagttctttttatactgaattttattaaaaatacaaagcaaccatttctataattgtcttttttttcccccactttaggtcagtgggcctcaaaaaaaaagtgaggcaatttcttaccactaccttagggaataaagaattctctctaccgtagcacgcacctccctgcagcatcttgggcagaaataggtacacgaaacacatttagtaaacattatttagctaactggtttccaaattcctgacaatgctaaaaaaaaatttattagatgtacttttaacagtatatatgacatacttctgctgccttctagaaaaattgaaagaagatgtttccatcaattatttcatcagttgttattcatcaattgtgctttgaaaaaatgtaccagtattttagtaaatctttcagtctcttctagttaatgttaactcattaaatctgttttccaaagaaagaataagcctgcattattggtcttagctacaaactgctataaatggcattcattgtttgcttttctcataggcaataggagcttaaatttgatgtcaaacatttttaaataaagacatttaaacatttggcatgttacacatttgtcttggttttaaaaataatttttaaaaatctttaaagaagatttctggtttcaaaaagaaatctgagatggaggtgatagtagcggaactctacataattactaaaaaatcaatgacttatgcacgtacaatgggtggattttatggtatgcaaatcgtacctcaataaagccactttaaaaattgagaaaattaagcacaaaacctaatttgatggcaaatgtgttaactcccttagattttgatacacttgtaaatccaattgtcttcacctcaatacatagctttctacatagcatacttggctttatttttccagatttccttgtgaaaagatatcgaaaacaaagacttgcctactcttgcctgattattctgcctgaatatttttaaagagaaatcttgccatctacatgtttagaccccgaggaaagttttaaaaatagaaggctaccttggtctctcggatcagcgtttaaagtaagcatggctctggtccgtggagacccagacctgggcaagtagatgattcgggatggtcacatatgcagataactggcacacacatgcacctcagctctcctccctgttgttcagccgcctcgacctttcctgccctgctcctgccaaatccatcttccaagccttctactgcttctccttccccattgcacccccgacttcctggaactcttggtaaagtcctgaattagtcttgccaagaacaacacacaaatctttctattttctagccccatctttccatttatttagctaaagctaaataatttcatcctgcctttgtaaaaagcagaatgttaacgctgtctattcattttacatccactcaatttccacattccaagaaatgtcctcccttttgaacaaatgtgtctagctatcatctttgctacacctcttccttttctggtccatcatctgctgaaagaacggtgtcctgcgtttcagtacctcctcctccgtgtaagccaagctctggacttcagatcatctgcatttgattagcgtctgtcctctgctgatattctaagttttttaatttttctaaatttatttgttttcctcctgaggcgctgccaaatatatagcatccctgagtctagtttcttaaggagacaactaaatctatgatttataagagtttagaggggacaggaagcttcaggcatgagcctgtttctattcattgtattttcaaaaacactgatgtttctcaaactcttgcaggtcttaaaactactctgaaatcataaaacccacttagaattcaaacagtctgcttctcactgggccattctgtgataagtggaattaaataatctctggccagcaataacagtagcaataccagtagcaatggtggtagcagtaaccatgtgtgccgtggtcatggggctggtaataataaccagaggagagatcatcatactcctaacagtagtggtggccatcatgacagtggtgtggccacagtagtgacagtgctggtagcataactgcttccatttatatatatataaaacatattccatatatgtgtgtatgtatatatatatatatatatttttttttttttttttgagacagagtcttgttctgttgcccaggctcgagtacaatggcgggatcttggctcactgcaacctctgcctcctaggttcaagcgattctcatgcttcagcctcccgagtagctgggattacaggcgcatgccactatgcccggctcattgtatttttggtagagacggggtttcaccatgttggccaggctggtctcgaactcctgacctcaagtgatctgcccgcttcggcctcccaaagtgttgggattacaggcatgagccactgcacctggcccttgcatatattactttatgtaatcctcacagcagccctacaggggcgatattatccccattttccagatgaagaaattaagactgggaaaggtagctttattcattgtggatcacacagctaggaaaaggcattcctggattcaaagtcaggtgtaatggagcccaaagtccacatccctaacctctgcatgaagctgcttctaagggaaacccccagaaaagccagatcctttctctccagggagcttcattccccttcattgcagccacaggctactgagagccacagcaggctgtgcccatcctggaaagtgtcctgtttctgtgtggagaagatgatcccccatgcctgctcagaccatcactgacctggcaggtggagctgccccaggaacacaagaggcctcccttccgtgcccctcatggccctggcctctgagtgacagccagagagctacaggggaagggacgggagggataaagaggagcttcttcaggcttctgcacctttcagagcttggaaaatgaatccactaactgcccagggtgcagaatcctcccaacctcctgcacgacccccaaactcagcaccctctctgaacctgggctttccggggccttccccagctgctcagcatgctgctcccgtctggcttttcactgtgcttcccagtcaggtgcaacatgaatgccaccccatcccaccccaaacccgatattcccactgttacattcttatgaattatttaaagggcttctccatcaaaggccatggagtgtcttccgtctgaattccatgataggtaaccatagattagcacaatgtgaattggtgtctgtgttgaatgacttcggttgaactttcagaaatttcatgtagagatacattagcatccgtaaattatctggcaataggaacgaatggctgctgaatttcaattcaaaatattattaaaataccgatgaaattatcactacaatttaaagtgtaaaaagatgaaaaacacgttctatactttctaagtctccagtcatattcttttactatcttcctgacagttgtttatttatttaattattgagacagggtctcactctgttgctggagtgcagtggcatgatcatggctcacttcagcctcgacctcctgggctcaagtgatccttccacctcagcctcccgagtagctgggaccacaggtgcgtgtcaccacatccagttaatttttttttttttttttggaaaagacagagtctcactatgttgcccaagctggtctcgaactcctgggcttaggcgatcctcccgtcttggtctcccaaagtgattacaagcgttgagccactgtgcccagccttcattacaatttttaaagatgtttatccataaaacaaagggttactgatattcagatgttatacaaggaccaaatatcactgccttcaatcctcctaacaactgctttaggtgtttttaagacttaaaatgtcactcatatattgtattattgaattctagtatttctggtattgtaataaattatagtaagaactttcaaatggaagcccaggatgaaaaatgttatagtttacttttgcccaaattctcttgttaaaattgcagtttcacgtatttgcttatctgcacattatctgtatgtatttttagcctcatcttatgtaataatatttctgaaatagtttagatatgctatttttataaattacattaaatataatttaaaatacatagtatatacaaaataaatatgtagctgtattagaactttataattatcccaaataccagttatcagccatactttgggttacaatgattaataagaagaatttgagatttggggtaaaaagccttagattctagtctcgtcctcttaagttcctttataagattaactagtactgaaccccattgtttgcacctgtaaaactaaataatcatgccttctgtactataggtgagaaaatgtctttgaaaatgttttgggccaggcgcggtggctcacagctataatctcagcactttgggaggccgcagcaggtgaatcacttgagatcaggagatcaagaccaatctggacaacagggcaaaaccccatctctactaaaaatacaaaaagttagccaggcttggtggggcatgcctgtagtcccagctagtcagctagtggggaggctgaggtgggaggaccacctgagcccgggaagtcaaggctacgatgagctgtgatcgtgccattgcactccagcctgggagacgggagtgagaccctgtctcaaaaaaaaaaagaatattttgtaatagtataaagtactatcacatgaaacctcttttttgggtaatgggtcttcctaatagaattaccctcctccaattttcagtttggaaactaatattccagggcttactgagggtatagttaactagagtagaggttatagttgccaagacaatcttcctatttcctcctcaaggaaactgacatcctttcccctagatctacccttcccctggcgcccagaaagctgtgccagacaatccatccatgctgtcccactcggaagtagggctgggccgggccaggccaggccagcccagcccagctcttagcttccccatcgttggatcctcggaccacctctggacagaggaaaaacacccagagtgaagaaaaggaaacaggtggttcaacttcctctgcttagggtccaggaaggagcaaacgtgggcccatcagtgcatgtagcaagaacaggaaccccaccgggtttcagtccagcttcgtctaatagagactgtctttatgtgctttgtcataagaaaagtcaagcagctaataaatagcagaaccgaccgggcgcagtggcttacccctgtaatcccagcactttgggaggccgaggcgggtggatcatgaggtcaggagttgaagaccagcctggccaacatggtgaaaccccatctctactaaaaatacaaaaattagctgggtgtggtggcgagcgcctgaaatcccagctactcaggaggctgaggcaggagaatcgtttgaaccagggaggcagaggttccaatgagccgagatcatgccattgcactccagcctgggcaacagggctagactccatctcaaaaaaaaaaaaaaaatagcagaaccaatattttaaaatgtcatctctcttccagattgctttaatttaggctggagtaggctgcgtgtcctcaggctctaggagacagcttttgagccatagacagagccacagaaagatccagtgtctcctaccacaccccttagttttgtgtgtctgttatgtcactggtgaccagagacacaaggctcctgcagagcaaagaaaaccgactccatgcacacttctctgtgtccccttccagtccccacgcccctctcctgtctcctggcatccctgaccttctaaagctgacttttaaatacctgttccttgaagcccttccctggccaaaccagcaccattgtgatagctccttctctctgcagctccttggccctgaagcaccacaaacatcataaactcacttgccctttaactgttaagtcatttgcatgagttaacttgagcccaagccaacatgaaaattctttttgtgaaaaggtctcactctgtcacccaggctggagtgcagtggtgtgatcacagctcactgcagccttgaccaggctcaagcgatcttccccactcagcccaagagtgctgggattacactaccacactggccccgacattaccagttttgaagtcagccatggtgtcctaccagaggctcagcaagtgttggccaactgaccagtgaatattaccagatcaggggcacagagagacatgtgcagataaaggagaggaaaagggtgagctcagagctggaaagctttgtggagacctggggtgattctgtcttctcctatcactgtcccctcgatcacccagctcacgccccagagagagccatcatgtgccctggtctgtcttccttccctcctcctgaccctttcccctgcttagctgctcctcacccttcacatgtcagtttaaacatcacgtcccacaggatgccccacctgatcaggttaggtcccctatcagttactcttcaactcccctgtgccttgcttttggagcaaacgttctagttcttaagtaatagtcatttctatcactgtctatttaatgtccttcccgccattagactggaagccctgtgaggtcagggaccacatctgccttgttgcctgctgtcgtaagtccctgggcctgtggcacgccaggtatgcagtaggctctgcatccatgtcaatgcagggagctgataggcacaggtgtgggccagggcatcctgcagagtttgatggggtgggaggcagagccccatatccctgagaccagctgggatgaagcctcactgcacattccaggtgacttaaagattcagcagggatgtgtgacagcaaagctttgcccagacaactacagtcccttccctaaggtcccaaattaaagaaaaagagtgacccaaatcaccaactaccgaacttgtgtccttctattcaggtaggtcggtattgctgctcttggctttgcattcagccttttccatcatcaccaggtcagcggtcacagagcatctcccgtgtacctggcaggtactgggtgctgggtgccaggtcctgggagtcaaaggtacgtgaggcctggcgcctccccacaggggcctcacagtgttgtgaaagacagcaatgtaaacaaatactctcactagatgggaacacaggctatacagagagctgtacagggaaagggtggagagggatttgctctaccaaggaggcctcaaaacacttcacagaggtgacaccttgacatctggaagcatcaggaggagtttgccagacagggaaagggccttcagagagagaacagggcatgcggcagagctgcagcgtggtgtgtgttggggtacaggcctcaggggactggcaggagatgaggctgaggggggagggtcccatcatgggcaggcttgggtctccactgaagatattgcacttaattctgcaagtccaaagaaaaccatggcagggttaaagcaagtggatgattccatcagatctgttttagaaagataacagcacgctcccaactagaaaagtgccactccctataaacatcctggcaccatgtccctgagagctccaggagccagctttggagccgggaagcctcactgagctgagggtgcctggcacccaaacggacatccttaaaatgaatgtcacaacaaaactgagagggaaccaagggcacacgagggcctttctaaggactctccaagtgggagaagttgcaaaataggaaagaagaatgaaacagtgcccatgagagtgtctccgggagcatcatcttccgcctttcctgaggagtttcagggcgctgttgacctcgtaggtaaggaggagccgtatcccaggaggccacagctgggctgagagatttagcaagtggaaggcacagccaggatctcgaggagaaatttgatcacggccaacactggctggaagtttaggaattccctgggaactgctgtgaggccagtcattcattcattgagcagaaagacttagcaccatatgggaaaagggtgataccccaaaaaaggactctagccgctgtattcaaatattagcgttaattctcacagagaactccctctcaggaagccacagcaacaccgtcatcagaatgtgccagaaggaaccccttcagtatccacagaagttaatttggaaacatagtgaatagggaaagacttagatcaatttgtggtttctagaaaattactcttttaggactatggagaaaaaagtcaagtactaagtaccagaaatgcaaaatatatgacaatttcccatagatgtgattactattgtcatcacgccatcatcatcaccttcaccatcaaattgtaagtcagattatgtcagtgcttatctgatccacgggcaatggccgaggtgtcagaaaaactacagttcgatggtgactgtttccttcctacgcggaagacacgtgtgctatggtgatactggccttcacctccaggagtctgaaatcatagacatatgtatagtaagatgtgcaaagcaattgaccagtgatttattacaacaaataacgccataggtaactgtcaaataaaagcccattgcgtccggagttccacggcaacgcgtggagatgcctggcattgctctaggtacccaatgtcgtatctgtgtgagcagtgcagtctcgcaaagatggccctgattgggaagaagtgcagccatggcaggccctcagatcgtccctgtgctcaccaccctggccttttctccgattcttgttgcatcaggtagcacctgcttcttccttccctctcccctccagcaaatggtaagctcccagagggcagggccaagtctcatcctctcactgtcccaagtgactcaccagggcctggcacaagggagctgctcggtccatacttgatggatgaatggataagtggtgactaacctaaggaaattctgccatttggcatcttggggatgccttacaagagaaaggcatcatttacagaaggctgcaagaggactcttcagtttatagacctgcatatccaagccagcctaaccatttctacctgggggagctaaaacacggaagttctcaacgtgaatgtgcattagaatcaccagaggagtcctagtcaacctctaggttttctgcacaaaccacgtggcactgggcccaggaatctgcattttaacaagtcccccccgcccattgttctgattcagggggtcacagaacacactcagagaacccttttcaatcaccaggcccctaagagcacaggcttggcattagatagagtcagctttatccctgttctattatatctttactaactgcagggctaagttgcacatggttcttaagctccttctgcctcagtttcctcagttattaaaaggggatgagtacaaactcagagacagaaaggagaatggtgctgagcagtggctcatgccttgtaatccgagcactctgggaggccgaggcaggaggatcacttgagcctaggagactgagaccagcttgggcaacatagggaggcctcgtctctacataaaaaattagctgggcatggtggtgcacacctatggtcccagccacatgggaggctgaggcaggaggatggcctgagcctgggaggtcgaggctgcagtaagccgtgatgacgccactgcactccagcctgggtgacagagtgaaacccaaggattctacttttgggatccttgtcaaaagtagaatggtggttgttgagggcagggggacatggaaatggagaattgtcttatagatacagagtttcagggatttggggttttttttttttttttaggatggagtcttgctctgttacctaggctggagtacagcggcatgatctcagctcactgcaacctctgcttcccaagttcaagcaattctcgtgcctcaacctcccgtgtagctgggattacaggcacccacgaccatgcccagctaatttttgtatttttagtagagacagggtttcaccatgttggccagtctggtctcgaactcctgacctcaggtgatccatccgccttggcctccaaagtgctgggattacaggcgtaagccaccatgcacaggctgcagagtttcagttttgcaagaaggaaaagctctggagatctgtagcacaatgtacatagagttaacactactgaactgcacacttaaaaatgtctaagatggtgaattttatgttttatgtttttgccacaactaaaaagaaaaagttttactggggttggataatggtatctacttcaaagtgttgttatgagcattacatgaaataatgtatgtaaagtgccaggcaacaggccccagactaggaactgctcaaaaaattatagctattattattacagtagcatgggtgttaaaaaatttaaccatgaggccatgcgcagtggctcacacctgtaatcccagcactttgggaggccgaggtgggcagatcagctgaggccaggagttcgagaccagcctggacaacatggtgaaacccagtctctactaaaaatacaaaaaaaattagccaaacgtggtggcacgcacctgtagtcccagctagttgggaggctgaggcaggagaatcgaacccgggaggcggaggttgcagtgagccgaggtaacaccactgcactccagcctgagcaacagagcgagactcagtctcaaaaaatatataataaatataaaatataatcattaaggaagatttcaaaccctcctcaaaaatccaagtagctttttgatgaactgcatttttctaaatcctgaccaatagactatttttcatctcacctatagacccacatgttaaaaaaataccacctaaattataggtggctatgtgagagcctggggatattcacgctaggcagtctcattcataacactaccatcctccatttgcagtgatgcaggaaacaagaaaaatgctacatttcgttttgcaccttaagcttcattaaagaaaatcaagcaaaacctgcgaccatagaagaaataatctcccagtcttgaaaaactacatgaagtgttttttatctttgatgtgcacatggaacccaaagcaggttcgggaacatggcacagactcacagccaccgtttggattctctgcgcaccgttttgatttcctgtgcatctatgctaatttcgtctccccagcctattgtttaaaccctagcaggacagatgtgctgttttacagggccataacccacttggtgggtggataaccaagaggcctttggtcttcatcatttactccaataagaaaactagacgattgccttgtaaaacagcatgtgacccaggcccggatttccacgtaacgccaacctacaggaccacctcggaacttccaaccaaattaggaaaattcctcctggtcacagaggtgaccaaaattagctcgaggctgaatgaaattatggaaaggacaatctaggggtaaaaacagtaaaaacaagagggctgggaagtgacttacagtacaggaatttaggtttaggccacacaggtgttcatgtgagtaagagtcatcatttctaaggctgaaaaggttggccactgctggtaaaaattctaatcctagtaggcttagaatctctctcaatcaaaagataaatcccaaaagtcattgctaaggattccccccatttttctttacctccatcctatgtataaccgtaagttactacctctcagccctcatcatgagagcccagcactcctgtcccggcagccctgagtgacatcagcattgactgttgggaattggtacttgtgaaatccagaaatgggctacaatagatgcaaatggaccatcatcaatgtgcattaggattgccccagccacccccagatctcgaaggacccctgcaacccagtcacaccagcatccttgccaacaggtcgaagcagggtggattaggatgaagggatatcatcgtaagcagcaaaaggaagtgatgaaaagaacacaaataaccagacattaactttgggttctgagcatgctgctttctgtccgtttaatctatcttttgctgatgcacttaaagaagctaccttgtcttcttaatgtggggatctctgatgaaggcttgaagctctgagacccaagcatcagccccagctctggctttccctagtcacatgaccttggaagatcacttctttttttttccttcttttactactctgagcctcagtttcctcatctaaaacagggcttaggttacttgacacagtctatataagtatggtagaagttttttaaaaaatgagtctgtaaaatgggactattccaagagatttcagagatgccttcccatcttaacattcaacagatctatgattcctttgttacagctcatgtccctggtatttctttcttttttgagatggagtcccgctctgtcactcatgctggagtgcagtggtgtgaccttggctcactgcaacctccacctcctgggttcaagcaattcttctgcctcagcctcccgagtagctgggagtacaggcgtgcaccactatgcccagctaatttttttgtatttttattagagacagggtttcaccgtgttggccaggctggtcttgaactcctgacttcaggtgatccgcccgccccggcctcccaaagtgctgggattacaggtgtgagccactgcgcctggccgtccctggtcactctaatcgtcttctgtatgggtttaccaacagactcatctctttgtaccctgtacaatcctaccttgcattttctcataaccttatcatgttacctctcaattatgttacagcaaggaggtaagattttgccattagcctgatggtacaattttttaaaacaataatcagttgccagaatatattcttgcttttaaagttctacataatatttcaaaaatatatagggaagtatttagattttccttccacagctgttttctgcttgatttcaagagttaactgaacagtttgctgtcttgtgtccaatgtgtttctcctctccattaaaatgctgaagatttttatttttttcccctctttagggggaaaaaagaagtgtttcctctgtaatttactttggctttctcaaaagttgggcgggaaagtcagtataattcaggtggaatctaaaatgttcttgttgcacaagtgtgcacagaaaggaaacctataatttcgagtattctttcaggaagtttgtattctctgttttccagggggcctttactttccaagggagtatgatcgacatgccattactgaagcaggcccagaacactgttacgcttgccacctccatcaaggaaaaatgatctgttaaatgaagctgtcatcaggtgggctgaacatatacagtggggttcttaaagacaaaccacaatactcaaagcaacttgttaggatgccagattgggacctgactccatttacagttcatgttaatcacaattttgttgttgttgtctcactggccagttattcccctaaaaaaatgaacgcttttccctttggatccaagcttatgattttatcatttttagtgtattacgaatatgggcttatgatttcacagggaggtaagatcctggggaaagatgggctgtgaggcgaaggtaggtctttaatgaaatggatctttcccaaatagacatattccctccacccttctcatgttagtaaatgtttcctgcttgttcatttatacagctgacaccacaaataattttaagaaaagccaggcctttaaaacatagtagcaacattaaggggtcatctctatttcactagtaatctgataaaacaacagagatggcatcaaaaaagaatactaagtattatattggcttaaaaagacactttctgaaaataaactttcgaaactggttactattaacctccacccctaaaacgaaacatccatctccttgaaccgctagacgatgaacacgaaagctgtcatcctgggtgaatgctgtgagtcaaccattaccggcaattaaaaaataaatgtgcagaaacacaagaccatccattctccccctttattttcccgtttaactgtttgccattgaggctatttccccctggaaatgtatggctgggacaggactccctcagtcataaacttgtagcgtctcagaagacacaatgcacccgagctggtgcatgtggcccctgcgagatttgcatcacattagagatgcggctgcaggtcagatgggtggtgtggttaacgggcttagtaaagctgttttgaagaggttaacccagcttgtagtaagggtaaataaacataacaaccagccattgttccctattcagcatgtactcttatattgaaggctaaagggtattgaagctgcagagggatcaacttgtgcttgccagaggacgccaatgaagtttgaaacaccaacaatcagagattttgtttctgttcctcattaaatcatgagcttttgtgccgagactctggacgactgttccttaagaaattaacagaatgggaagttttaaactctacaccaaccttttcatgacctacacagcagcaacgctgctactcttagacaaacaccgcggggaaggctgttctgtttatttaaatttgtaaatagaaaacagttgttttttactttcatttttcacctcctcctacgcccttttggattatttcctctgcggcccctagcatgagccccaaccaggcctccccttttccccacttctctcaattcccacaggaagcccgagaggtgaggagctgaggttagacaccaggagaggcaccatcacacaaaagcgcggccgcagagtcccaccgccaccaggcgacccccacccagagagggacagacatgcggggagccagcaccgggcaagatggctctggggatcctcattctgtgaagacaccaactcatttctcaaacacaggatccaggagacagatagctcctaaatggagatggcacatgctccgtggggtccctcatagaggagtgccaccctccacactggccacgctgggctgccccagagcggccagaaaggaaggtgggagctagccccatcctcactcagaggccggaaggaggaagatggcatctcgccaacttcagagccgaatggcctctagccacactgcttccagaccccagacggggcagcagcagcagttcccagaggagcacccattgttgcagctaggacccaccaaggatgggactcctggagtcaggtgcacaccaggtaacccaggaccacgctgtgcacccccagtctgcccctctgctcagaacacagagggatgggaggatggcttggcagtgggaaggcaaaagaaggcctctctcactctgcccctgccatacgcacccgctgagggtgttagaagcagtggaggcagagctggccctaagcaaaagaagaaaataaacctcaccttgtccttcctatgggcagccctcaccccaatctaactaaccttcccatcctccagcctaatccaaagaagcccttggcttgaggggatgaagggcttgcgttctagtctccaccccagccccacaggcagccagccagccagccccacacagaggggcctcctcaaggcctcactgggagcctcctgtccccagccaaggagccctacagacctggggaaaagcaggcccctccgcaaggcccctgggtggtgcggaggccggaccggctaggcctcccgctgctggccactcccaggccacgggttcctaggtcccaaccacattggactgctcgccacgccactgccctcatcccaaactgctttgttcaaacaaaaccaccttgtttcagtctccccaaatgtccagttcattatcttcctcataacccatggtccctattagggtaggatcatgagactaagacctatgagagccacaaatctggaccaaagtcccattccctgaacagagacccaaacgacgagggtcccagaagagagttcagtcctgatcagaaacccatggtgccttagtccttgaagaacaaaactctaggaagaagatgctggaaggcaaagggtattccccctctttccccacccgcgtctctgtggtgccatgggtgggcccaggtaccctgggaaaggtgggagagcagtcaagggtgggtgtgtgatctccactgggctcactgggcacccccgacacggggaagtgagagctgcccgactcctgagccaggcgtgggtgacaggaagaggaccttgcagctaatctgattcattagaaaccatacctgtttatgttttgtgtagctcatcacaagccgcttagccatatcacccccgttattaattcttggggtctaaattatgggtaacactattaaaacattatcagaactaatgagaaacaattacttagaaaatgagccgggacaagactgagttgggaacatcagtggtgatcactgtagattagtttaataaatcatcaggtgcaaggcaagactgactgtatgtatgcaaagccccgtcacgggaaaatgaaattgagattttttttttttgcataattttttcattaatctcaataggacccgtgtggtgtagattgctttattcccctaataccttgcctgaggcgggggggggggggggtgcccaataatgtcttcattgttttactgaggtcttaatgacaatctgtgacaacctcattttaatgtatagaggattatatcaatacagtcatgttttattgaaatggtgaagggaactccagtcagagtcaggcagtgtctgtgagcacaagttaggaagtttctcggcatccgggagcgttcccgtctgatgtcccagtgttagtcctcccggccgccctcccctcctctcctccagggacggctgggaaaacagtcctgcgggatgaagacttcaccgcctccgatttgaatttgaaagtaactccttccgtggcatatttcgctgggcagatagaacaaaccatgtcgttttcccccgtctctaaaatagacatattattatcattcacacttttgcacccggtcgttttgcgggagttcgggaaactgactttcttcattggggacattgtaattttctgatgatgccacgaggagaaaaaaaatacgggtttgttttaattggaaggaccttccgcttttatgatttcggtttaccttggaaaactgaatcttctgtgttttatttctttcctctagtactagaaaagcaatgaattaattgcacaaaacaggttctgagacggcccgcaggccccgagctcgtggacgcggccgagggtcgggtgtgacccgcggagccgctgccaggcttcccagctcgtcttcgcggggaggcgggaggcaggaccagaccccagcatttcagcgtgaaagtcttcgcctttctttccgcgctgtctttcccgcgggcggagcggcgtacctgagcgcggtccccacggaggatcagtgactttcccagaccccgcgggcgagcccgcgcttgggacccggcagctctgcgcgggctggttttggagggggtggtgttcgtttgtttaaattccagttgttatttggcagcatatcgccttccgagtcagtaagaattgcccacgacgtaaagagcgacttgcaggaaggggccgaagccgtcgttagcgcccgggcggcggcggccactcgaaccccgtttccgccaagcgcgctgcaacctgcggggcgagttcgttttgttttgccaaaatcatttggggacttctttgtcattcatgcccttccttttaaatgatttttatttttttccactgtaagtgaccggctgggtttgacttttgcttcttccgacggaagggcaccgcgagccggggtgggcggccccgcgggcaggaggagcgcggggtacacgcggtggccgcagacgccgagccctgcggagccccgaggcctcgtcgcccgcgcccccggtgcgcgcggagccggggccgaggccgggccaggaggagtgtggcggcccaggaggcctggactgtgggccctgctcgcccgcccgccgcgggccgcccggagcccgcgcgcctgtcgcgcagcccggctgtaatggtggcagatcaaaggcggccccgtgtccccgcggagcccgggacaatcccgcgcctttgtgcgctgttgctaggagcccgagaaactaagagaaagtgtcaggagcatgttaatcagactcgttacactgtaacaataacgtctctctcgggtctcccaggccccagtacccccgcgcaccctgcgcgcaggccggacacctgcgcagggcccttgcgcccgccctggggtcccgccggccctggggtccctgcagccccgaatccgcacccgagccacgcggaacgactagccccgaggggccccgcaggctcccggtgcagctccctggtcgtggtctccttgaccgaagccccggcctcacaccgcctggccgcgagcccgagggacgcagggacgatcccggtcccctgcttttcagtcctccagtcgaatcgcccactttgttcaatcacagtattcgaatcaagaggaaaatgaacattccctttatggtagctttttggttatgagttttggcaaaactgttaaatcaactttgccgatttcccttgggaatccctggaggccactctaagtggtaatcccaagtttaagaaggaaatggggaaattttgctgagagtaaagatgtcgccgaactttttgaagggatttgcttcattcattcatttagtcattcaacagacacctgttgaacccgactgggtgccagaggggccagtcacaggacttattccagatgaacttttcttttgaaattagaatgcccttgtggaagccaaaggaggagcagaggcctaaaataatgtcaagtgtcaaagcaaaaagaagtgccattggctactacagtgtgtgatgataacaagagaggtgcgaattaggaattaaaaacgtttgaaaaactacaggccatatgctttgaaaccagccactttttccatctttcatctccctctcccctccggttttggtgggcaggagctatgccaggctgcagtcctcaacccgtcagaggcctgcctgaggtctgaggagtgaggccaggccttctgtttgtacacagcctttcaaacgtgcagagagacacactccatcctggccccattccccctttgctcatacgcagggaactggaaacctgtcctcaagattagggctgaatttggccaagttaaggtgcttttctcccatacaagctcttgttcgagaacaaacccattctggaaggtatagaagggggccagacttccagagtcaagctacccgcacctaagtcacaggacaaagctggctgtcaccaggatgggtgtaagacagcctctcaactcacctgtgcctaccattgactgaggaggaatcccaaaactgtgtgagactcctctgtcggtgaaactttctctctttcaccgttgcatgcaacatgtaaacatatagaaaactgggtcgggtgcagtgacttacgcctgtaatcccagcactttgggaggctgaggtgggcagatcacttaaggt

SEQ ID NO: 25 - DNA, 12613 bp, Homo sapiens
  source 1..12613: mol_type = genomic DNA
gaaaatccccactaagatcctgggtccagaaaaagatgggaaacctgtttagctcacccgtgagcccatagttaaaactctttagacaacaggttgtttccgtttacagagaacaataatattgggtggtgagcatctgtgtgggggttggggtgggataggggatacggggagagtggagaaaaaggggacacagggttaatgtgaagtccaggatccccctctacatttaaagttggtttaagttggctttaattaatagcaactcttaagataatcagaattttcttaaccttttagccttactgttgaaaagccctgtgatcttgtacaaatcatttgcttcttggatagtaatttcttttactaaaatgtgggcttttgactagatgaatgtaaatgttcttctagctctgatatcctttattctttatattttctaacagattctgtgtagtgggatgagcagagaacaaaaacaaaataatccagtgagaaaagcccgtaaataaaccttcagaccagagatctattctctagcttattttaagctcaacttaaaaagaagaactgttctctgattcttttcgccttcaatacacttaatgatttaactccaccctccttcaaaagaaacagcatttcctacttttatactgtctatatgattgatttgcacagctcatctggccagaagagctgagacatccgttcccctacaagaaactctccccggtaagtaacctctcagctgcttggcctgttagttagcttctgagatgagtaaaagactttacaggaaacccatagaagacatttggcaaacaccaagtgctcatacaattatcttaaaatataatctttaagataaggaaagggtcacagtttggaatgagtttcagacggttataacatcaaagatacaaaacatgattgtgagtgaaagactttaaagggagcaatagtattttaataactaacaatccttacctctcaaaagaaagatttgcagagagatgagtcttagctgaaatcttgaaatcttatcttctgctaaggagaactaaaccctctccagtgagatgccttctgaatatgtgcccacaagaagttgtgtctaagtctggttctcttttttctttttcctccagacaagagggaagcctaaaaatggtcaaaattaatattaaattacaaacgccaaataaaattttcctctaatatatcagtttcatggcacagttagtatataattctttatggttcaaaattaaaaatgagcttttctaggggcttctctcagctgcctagtctaaggtgcagggagtttgagactcacagggtttaataagagaaaattctcagctagagcagctgaacttaaatagactaggcaagacagctggttataagactaaactacccagaatgcatgacattcatctgtggtggcagacgaaacattttttattatattatttcttgggtatgtatgacaactcttaattgtggcaactcagaaactacaaacacaaacttcacagaaaatgtgaggattttacaattggctgttgtcatctatgaccttccctgggacttgggcacccggccatttcactctgactacatcatgtcaccaaacatctgatggtcttgccttttaattctcttttcgaggactgagagggagggtagcatggtagttaagagtgcaggcttcccgcattcaaaatcggttgcttactagctgtgtggctttgagcaagttactcaccctctctgtgcttcaaggtccttgtctgcaaaatgtgaaaaatatttcctgcctcataaggttgccctaaggattaaatgaatgaatgggtatgatgcttagaacagtgattggcatccagtatgtgccctcgaggcctcttaattattactggcttgctcatagtgcatgttctttgtgggctaactctagcgtcaataaaaatgttaagactgagttgcagccgggcatggtggctcatgcctgtaatcccagcattctaggaggctgaggcaggaggatcgcttgagcccaggagttcgagaccagcctgggcaacatagtgtgatcttgtatctataaaaataaacaaaattagcttggtgtggtggcgcctgtagtccccagccacttggaggggtgaggtgagaggattgcttgagcccgggatggtccaggctgcagtgagccatgatcgtgccactgcactccagcctgggcgacagagtgagaccctgtctcacaacaacaacaacaacaacaaaaaggctgagctgcaccatgcttgacccagtttcttaaaattgttgtcaaagcttcattcactccatggtgctatagagcacaagattttatttggtgagatggtgctttcatgaattcccccaacagagccaagctctccatctagtggacagggaagctagcagcaaaccttcccttcactacaaaacttcattgcttggccaaaaagagagttaattcaatgtagacatctatgtaggcaattaaaaacctattgatgtataaaacagtttgcattcatggagggcaactaaatacattctaggactttataaaagatcactttttatttatgcacagggtggaacaagatggattatcaagtgtcaagtccaatctatgacatcaattattatacatcggagccctgccaaaaaatcaatgtgaagcaaatcgcagcccgcctcctgcctccgctctactcactggtgttcatctttggttttgtgggcaacatgctggtcatcctcatcctgataaactgcaaaaggctgaagagcatgactgacatctacctgctcaacctggccatctctgacctgtttttccttcttactgtccccttctgggctcactatgctgccgcccagtgggactttggaaatacaatgtgtcaactcttgacagggctctattttataggcttcttctctggaatcttcttcatcatcctcctgacaatcgataggtacctggctgtcgtccatgctgtgtttgctttaaaagccaggacggtcacctttggggtggtgacaagtgtgatcacttgggtggtggctgtgtttgcgtctctcccaggaatcatctttaccagatctcaaaaagaaggtcttcattacacctgcagctctcattttccatacagtcagtatcaattctggaagaatttccagacattaaagatagtcatcttggggctggtcctgccgctgcttgtcatggtcatctgctactcgggaatcctaaaaactctgcttcggtgtcgaaatgagaagaagaggcacagggctgtgaggcttatcttcaccatcatgattgtttattttctcttctgggctccctacaacattgtccttctcctgaacaccttccaggaattctttggcctgaataattgcagtagctctaacaggttggaccaagctatgcaggtgacagagactcttgggatgacgcactgctgcatcaaccccatcatctatgcctttgtcggggagaagttcagaaactacctcttagtcttcttccaaaagcacattgccaaacgcttctgcaaatgctgttctattttccagcaagaggctcccgagcgagcaagctcagtttacacccgatccactggggagcaggaaatatctgtgggcttgtgacacggactcaagtgggctggtgacccagtcagagttgtgcacatggcttagttttcatacacagcctgggctgggggtggggtgggagaggtcttttttaaaaggaagttactgttatagagggtctaagattcatccatttatttggcatctgtttaaagtagattagatcttttaagcccatcaattatagaaagccaaatcaaaatatgttgatgaaaaatagcaacctttttatctccccttcacatgcatcaagttattgacaaactctcccttcactccgaaagttccttatgtatatttaaaagaaagcctcagagaattgctgattcttgagtttagtgatctgaacagaaataccaaaattatttcagaaatgtacaactttttacctagtacaaggcaacatataggttgtaaatgtgtttaaaacaggtctttgtcttgctatggggagaaaagacatgaatatgattagtaaagaaatgacacttttcatgtgtgatttcccctccaaggtatggttaataagtttcactgacttagaaccaggcgagagacttgtggcctgggagagctggggaagcttcttaaatgagaaggaatttgagttggatcatctattgctggcaaagacagaagcctcactgcaagcactgcatgggcaagcttggctgtagaaggagacagagctggttgggaagacatggggaggaaggacaaggctagatcatgaagaaccttgacggcattgctccgtctaagtcatgagctgagcagggagatcctggttggtgttgcagaaggtttactctgtggccaaaggagggtcaggaaggatgagcatttagggcaaggagaccaccaacagccctcaggtcagggtgaggatggcctctgctaagctcaaggcgtgaggatgggaaggagggaggtattcgtaaggatgggaaggagggaggtattcgtgcagcatatgaggatgcagagtcagcagaactggggtggatttgggttggaagtgagggtcagagaggagtcagagagaatccctagtcttcaagcagattggagaaacccttgaaaagacatcaagcacagaaggaggaggaggaggtttaggtcaagaagaagatggattggtgtaaaaggatgggtctggtttgcagagcttgaacacagtctcacccagactccaggctgtctttcactgaatgcttctgacttcatagatttccttcccatcccagctgaaatactgaggggtctccaggaggagactagatttatgaatacacgaggtatgaggtctaggaacatacttcagctcacacatgagatctaggtgaggattgattacctagtagtcatttcatgggttgttgggaggattctatgaggcaaccacaggcagcatttagcacatactacacattcaataagcatcaaactcttagttactcattcagggatagcactgagcaaagcattgagcaaaggggtcccatagaggtgagggaagcctgaaaaactaagatgctgcctgcccagtgcacacaagtgtaggtatcattttctgcatttaaccgtcaataggcaaaggggggaagggacatattcatttggaaataagctgccttgagccttaaaacccacaaaagtacaatttaccagcctccgtatttcagactgaatgggggtggggggggcgccttaggtacttattccagatgccttctccagacaaaccagaagcaacagaaaaaatcgtctctccctccctttgaaatgaatataccccttagtgtttgggtatattcatttcaaagggagagagagaggtttttttctgttctgtctcatatgattgtgcacatacttgagactgttttgaatttgggggatggctaaaaccatcatagtacaggtaaggtgagggaatagtaagtggtgagaactactcagggaatgaaggtgtcagaataataagaggtgctactgactttctcagcctctgaatatgaacggtgagcattgtggctgtcagcaggaagcaacgaagggaaatgtctttccttttgctcttaagttgtggagagtgcaacagtagcataggaccctaccctctgggccaagtcaaagacattctgacatcttagtatttgcatattcttatgtatgtgaaagttacaaattgcttgaaagaaaatatgcatctaataaaaaacaccttctaaaataattcattatattcttgctctttcagtcaagtgtacatttagagaatagcacataaaactgccagagcattttataagcagctgttttcttccttagtgtgtgtgcatggaaaatccccactaagatcctgggtccagaaaaagatgggaaacctgtttagctcacccgtgagcccatagttaaaactctttagacaacaggttgtttccgtttacagagaacaataatattgggtggtgagcatctgtgtgggggttggggtgggataggggatacggggagagtggagaaaaaggggacacagggttaatgtgaagtccaggatccccctctacatttaaagttggtttaagttggctttaattaatagcaactcttaagataatcagaattttcttaaccttttagccttactgttgaaaagccctgtgatcttgtacaaatcatttgcttcttggatagtaatttcttttactaaaatgtgggcttttgactagatgaatgtaaatgttcttctagctctgatatcctttattctttatattttctaacagattctgtgtagtgggatgagcagagaacaaaaacaaaataatccagtgagaaaagcccgtaaataaaccttcagaccagagatctattctctagcttattttaagctcaacttaaaaagaagaactgttctctgattcttttcgccttcaatacacttaatgatttaactccaccctccttcaaaagaaacagcatttcctacttttatactgtctatatgattgatttgcacagctcatctggccagaagagctgagacatccgttcccctacaagaaactctccccggtaagtaacctctcagctgcttggcctgttagttagcttctgagatgagtaaaagactttacaggaaacccatagaagacatttggcaaacaccaagtgctcatacaattatcttaaaatataatctttaagataaggaaagggtcacagtttggaatgagtttcagacggttataacatcaaagatacaaaacatgattgtgagtgaaagactttaaagggagcaatagtattttaataactaacaatccttacctctcaaaagaaagatttgcagagagatgagtcttagctgaaatcttgaaatcttatcttctgctaaggagaactaaaccctctccagtgagatgccttctgaatatgtgcccacaagaagttgtgtctaagtctggttctcttttttctttttcctccagacaagagggaagcctaaaaatggtcaaaattaatattaaattacaaacgccaaataaaattttcctctaatatatcagtttcatggcacagttagtatataattctttatggttcaaaattaaaaatgagcttttctaggggcttctctcagctgcctagtctaaggtgcagggagtttgagactcacagggtttaataagagaaaattctcagctagagcagctgaacttaaatagactaggcaagacagctggttataagactaaactacccagaatgcatgacattcatctgtggtggcagacgaaacattttttattatattatttcttgggtatgtatgacaactcttaattgtggcaactcagaaactacaaacacaaacttcacagaaaatgtgaggattttacaattggctgttgtcatctatgaccttccctgggacttgggcacccggccatttcactctgactacatcatgtcaccaaacatctgatggtcttgccttttaattctcttttcgaggactgagagggagggtagcatggtagttaagagtgcaggcttcccgcattcaaaatcggttgcttactagctgtgtggctttgagcaagttactcaccctctctgtgcttcaaggtccttgtctgcaaaatgtgaaaaatatttcctgcctcataaggttgccctaaggattaaatgaatgaatgggtatgatgcttagaacagtgattggcatccagtatgtgccctcgaggcctcttaattattactggcttgctcatagtgcatgttctttgtgggctaactctagcgtcaataaaaatgttaagactgagttgcagccgggcatggtggctcatgcctgtaatcccagcattctaggaggctgaggcaggaggatcgcttgagcccaggagttcgagaccagcctgggcaacatagtgtgatcttgtatctataaaaataaacaaaattagcttggtgtggtggcgcctgtagtccccagccacttggaggggtgaggtgagaggattgcttgagcccgggatggtccaggctgcagtgagccatgatcgtgccactgcactccagcctgggcgacagagtgagaccctgtctcacaacaacaacaacaacaacaaaaaggctgagctgcaccatgcttgacccagtttcttaaaattgttgtcaaagcttcattcactccatggtgctatagagcacaagattttatttggtgagatggtgctttcatgaattcccccaacagagccaagctctccatctagtggacagggaagctagcagcaaaccttcccttcactacaaaacttcattgcttggccaaaaagagagttaattcaatgtagacatctatgtaggcaattaaaaacctattgatgtataaaacagtttgcattcatggagggcaactaaatacattctaggactttataaaagatcactttttatttatgcacagggtggaacaagatggattatcaagtgtcaagtccaatctatgacatcaattattatacatcggagccctgccaaaaaatcaatgtgaagcaaatcgcagcccgcctcctgcctccgctctactcactggtgttcatctttggttttgtgggcaacatgctggtcatcctcatcctgataaactgcaaaaggctgaagagcatgactgacatctacctgctcaacctggccatctctgacctgtttttccttcttactgtccccttctgggctcactatgctgccgcccagtgggactttggaaatacaatgtgtcaactcttgacagggctctattttataggcttcttctctggaatcttcttcatcatcctcctgacaatcgataggtacctggctgtcgtccatgctgtgtttgctttaaaagccaggacggtcacctttggggtggtgacaagtgtgatcacttgggtggtggctgtgtttgcgtctctcccaggaatcatctttaccagatctcaaaaagaaggtcttcattacacctgcagctctcattttccatacagtcagtatcaattctggaagaatttccagacattaaagatagtcatcttggggctggtcctgccgctgcttgtcatggtcatctgctactcgggaatcctaaaaactctgcttcggtgtcgaaatgagaagaagaggcacagggctgtgaggcttatcttcaccatcatgattgtttattttctcttctgggctccctacaacattgtccttctcctgaacaccttccaggaattctttggcctgaataattgcagtagctctaacaggttggaccaagctatgcaggtgacagagactcttgggatgacgcactgctgcatcaaccccatcatctatgcctttgtcggggagaagttcagaaactacctcttagtcttcttccaaaagcacattgccaaacgcttctgcaaatgctgttctattttccagcaagaggctcccgagcgagcaagctcagtttacacccgatccactggggagcaggaaatatctgtgggcttgtgacacggactcaagtgggctggtgacccagtcagagttgtgcacatggcttagttttcatacacagcctgggctgggggtggggtgggagaggtcttttttaaaaggaagttactgttatagagggtctaagattcatccatttatttggcatctgtttaaagtagattagatcttttaagcccatcaattatagaaagccaaatcaaaatatgttgatgaaaaatagcaacctttttatctccccttcacatgcatcaagttattgacaaactctcccttcactccgaaagttccttatgtatatttaaaagaaagcctcagagaattgctgattcttgagtttagtgatctgaacagaaataccaaaattatttcagaaatgtacaactttttacctagtacaaggcaacatataggttgtaaatgtgtttaaaacaggtctttgtcttgctatggggagaaaagacatgaatatgattagtaaagaaatgacacttttcatgtgtgatttcccctccaaggtatggttaataagtttcactgacttagaaccaggcgagagacttgtggcctgggagagctggggaagcttcttaaatgagaaggaatttgagttggatcatctattgctggcaaagacagaagcctcactgcaagcactgcatgggcaagcttggctgtagaaggagacagagctggttgggaagacatggggaggaaggacaaggctagatcatgaagaaccttgacggcattgctccgtctaagtcatgagctgagcagggagatcctggttggtgttgcagaaggtttactctgtggccaaaggagggtcaggaaggatgagcatttagggcaaggagaccaccaacagccctcaggtcagggtgaggatggcctctgctaagctcaaggcgtgaggatgggaaggagggaggtattcgtaaggatgggaaggagggaggtattcgtgcagcatatgaggatgcagagtcagcagaactggggtggatttgggttggaagtgagggtcagagaggagtcagagagaatccctagtcttcaagcagattggagaaacccttgaaaagacatcaagcacagaaggaggaggaggaggtttaggtcaagaagaagatggattggtgtaaaaggatgggtctggtttgcagagcttgaacacagtctcacccagactccaggctgtctttcactgaatgcttctgacttcatagatttccttcccatcccagctgaaatactgaggggtctccaggaggagactagatttatgaatacacgaggtatgaggtctaggaacatacttcagctcacacatgagatctaggtgaggattgattacctagtagtcatttcatgggttgttgggaggattctatgaggcaaccacaggcagcatttagcacatactacacattcaataagcatcaaactcttagttactcattcagggatagcactgagcaaagcattgagcaaaggggtcccatagaggtgagggaagcctgaaaaactaagatgctgcctgcccagtgcacacaagtgtaggtatcattttctgcatttaaccgtcaataggcaaaggggggaagggacatattcatttggaaataagctgccttgagccttaaaacccacaaaagtacaatttaccagcctccgtatttcagactgaatgggggtggggggggcgccttaggtacttattccagatgccttctccagacaaaccagaagcaacagaaaaaatcgtctctccctccctttgaaatgaatataccccttagtgtttgggtatattcatttcaaagggagagagagaggtttttttctgttctgtctcatatgattgtgcacatacttgagactgttttgaatttgggggatggctaaaaccatcatagtacaggtaaggtgagggaatagtaagtggtgagaactactcagggaatgaaggtgtcagaataataagaggtgctactgactttctcagcctctgaatatgaacggtgagcattgtggctgtcagcaggaagcaacgaagggaaatgtctttccttttgctcttaagttgtggagagtgcaacagtagcataggaccctaccctctgggccaagtcaaagacattctgacatcttagtatttgcatattcttatgtatgtgaaagttacaaattgcttgaaagaaaatatgcatctaataaaaaacaccttctaaaataattcattatattcttgctctttcagtcaagtgtacatttagagaatagcacataaaactgccagagcattttataagcagctgttttcttccttagtgtgtgtgcatgtgtgtgtgatgtatacaaagagagagataattgtatttttgtattttcttttaaataatttttaaaattgacccttttcctgagacaaattgccagaatagtttgtatttagagatggtacctctaagagtaaggttgctggttgctgagcaattgacttgaaaacttttaaaattcaaattttaattccactactcaaaagaattgccatgttttaaaaaagagaattggtgccataagttagttgtctatgtttgaaaatgaagaagatatgcaacgtcatggcctggtcacttacccgcagccctgagttgtaggcacatcatatgtgagaatgaggatgcttttctttcatttaaaatccctccccaaaacttggctctaattgcagtcatgacaatcatgtacatttggatttatgtgcacgagtctcttaccctgagagaggacaggtgctacaggtggaggggacccgtctgggtcacgttcacat

SEQ ID NO: 26 - DNA, 61549 bp, Homo sapiens
  source 1..61549: mol_type = genomic DNA
tctcgtactcctgaccttgagtgatccacctgcctcggcctcccaaagtgctgggattacaggcatgagccaccgcgccgggctaatatgctcattttagtgaggcaaaaatagaggctcagagtctgatttgtacaaaactacagagcagttaagtgtcctctcagatgtgtaccctgatctgggtgactctaggactctaggtctcaactgttacaaccagttaagggtttggggaagcactgggccaagagtcaggaaaatggaagccacaggtagtgcaaggtcttgggaatgggacgtctggtccaaggattcacgcgatgactggaacccgaagagccggggcccggtttacggccgccatgaagcaacgcgcgccggtaggtttgggaatcagggagccctctgaataggagactgagttgggagggaaaggggcttcgctgggggagcctcggcttcttctgggagaaaattcccacggctacctagtgagcctgcaaactggtaggcgccggcgtaggcgcgcgggcggggccgggggcggggcctgcggggcgtggcggggcgggcagagggcggggcctgcttctcctcagcttcaggcggctgcgacgagccctcaggcgaacctctcggctttcccgcgcggcgccgcctcttgctgcgcctccgcctcctcctctgctccgccaccggcttcctcctcctgagcagtcagcccgcgcgccggccggctccgttatggcgacccgcagccctggcgtcgtggtgagcagctcggcctgccggccctggccggttcaggcccacgcggcaggtggcggccgggccctgaggcgcgggatccgcagtgcgggctcgggcggccgggcccagggaaccccgcaggcgggggcggccagtttcccgggttcggctttacgtcacgcgagggcggcagggaggacggaatggcggggtttggggtgggtccctcctcgggggagccctgggaaaagaggactgcgtgtgggaagagaaggtggaaatggcgttttggttgacatgtgccgcctgcgagcgtgctgcggggaggggccgagggcagattcgggaatgatggcgcggggtgggggcgtgggggctttctcgggagaggcccttccctggaagtttggggtgcgatggtgaggttctcggggcacctctggaggggcctcggcacggaaagcgaccacctgggagggcgtgtggggaccaggttttgcctttagttttgcacacactgtagttcatctttatggagatgctcatggcctcattgaagccccactacagctctggtagcggtaaccatgcgtatttgacacacgaaggaactagggaaaaggcattaggtcatttcaagccgaaattcacatgtgctagaatccagattccatgctgaccgatgccccaggatatagaaaatgagaatctggtccttaccttcaagaacattcttaaccgtaatcagcctctggtatcttagctccaccctcactggttttttcttgtttgttgaaccggccaagctgctggcctccctcctcaaccgttctgatcatgcttgctaaaatagtcaaaaccccggccagttaaatatgctttagcctgctttattatgattatttttgttgttttggcaatgacctggttacctgttgtttctcccactaaaactttttaagggcaggaatcaccgccgtaactctagcacttagcacagtacttggcttgtaagaggtcctcgatgatggtttgttgaatgaatacattaaataattaaccacttgaaccctaagaaagaagcgattctatttcatattaggcattgtaatgacttaaggtaaagagcagtgctattaacggagtctaactgggaatccagcttgtttgggctatttactagttgtgtggctgtgggcaacttacttcacctctctgggcttaagtcattttatgtatatctgaggtgctggctacctcttggagttattgagaggattataagacagtctatgtgaatcagcaacccttgcatggcccctggcggggaacagtaataatagccatcatcatgtttacttacatagtcctaattagtcttcaaaacagccctgtagcaatggtatgattattaccattttacagatgaggaacctttgaagcctcagagaggctaacagacataccctaggtcatacagttattaagagaaggagctctgtctcgaacctagctctctctctctcgagtaataccagttaaaaaataggctacaaataggtactcaaaaaaatggtagtggctgttgtttttattcagttgctgaggaaaaaatgttgatttttcatctctaaacatcaacttacttaattctgccaatttcttttttttgagacagggtctcactctgtcacctaggatggagtgcagtggcacaatcactgctcactgcagcctcgacttcccgggctcgggtgattctccccaggctcaggggattctcccacttcagcctcccaagtagctgggactacaggtgcgcaccaccatccctggctaatatttgtactttattttatttatttatttatttattttttgagatggagtttcgctcttgttgcccgggctggagtacagtggcatgatctcggctcagtgcaacctctgcctcccgggttcaagcgattctcctacctcatccccctgagtagctgggattacaggcgcctgccaccatgcctggctaattttttgtatttttaatagagacgaggtttcaccatgttggccaggctactctcgaactcctgatctcaggtgatccacccgccttggcctcccaaagtgctgggattacaggcgtgagccactgcgcccggcctaatatttgtattttttgtagagatggtgttttgccatgttgtccaggctggtcttgaactcctgagctcaagcgatctgcccgcctctgcttcccaaagtgctgggattacaggcatgagccaccgtgcctggcctaggtagacgcttttagctttggggtgtgatgcctgccccagtatatagtgaatttaattattgctagagctggctgtttgttagttttctttgaacataagatactcattgtttttagtttgcaaatccctcttcctttttaaaaaatttctttcccttaaattgtttgcatgttagcaataacaaatgcttaaatggtgctatgtgctagatactcttctaagccctgttatgtatattaactaattttttaaattacacaaatcagagaggttaagtaacttgcccaagattacccaacaatactaggatttgaacctaagtttgtctcaccccagattctgctcttaatctctaaacttttaagttagtagtgacaatagtaggtatttattgaatacttaactatgttttaggcgttgaagtaaatattttgcaggcattatctaatgtaaacaccctaaagttacataacaggtaccctttaggtaaataaacactagtatgaccttggaggcacagatagttgaagtaacttgcccaatatcacttacatgaaattggccctcaaatgtgtctgatacaacccatgctgcttgtaactatcgttttaaactgccagggtaaacttggacacacttgagctaagaaaaagcttttagatttttgcaaattaatgtgaaagatatgctttatgtggatataatatcttctaaatttcggggatggtagtcctagaaatgtaatcctgccctagccgagcttaccctgccaataattttttacagaattggtaaaacggagcaccttttttttgtccttggccacactgttatcaacagggtgtagattgacatcaatctgtaggtgtaaaccagaattactctttgtgaccaccaggaaatagagcagttcagttcaggggtttctttctgtgaatttagcactgtgacctgcatactacaagtctactttgttttctatccattgtttgtatctgggtattgcaaaaggtaggaaaaggaccaaccagatcagcagagaagagttgccttggagttttcttttagttttctgcagttcattagatagtaactaggccatgtcattttactcccttgtagtgaagatatgttgaagttgtactggtatactcttctacctttctgtaattttatattgtgtagacttgataaaatttatgtgtcaatcaccaccattaatatcaatattgagcctcaattcttatttttctgcccagtggctgccaaattactaacatttacaataattcactactactaagataatctactagttcgatcacatacttcaaattgttatggaactactgtcttcagcattgtgcttctgataactgataagtataattttttttttgtccagagtgaacatgtctattcttccactgtacacactaataaaaggaaaaattgtaatattgggtaaattcatgtccttacacatgtagtagttatgagcccatgtccctagaatgagtaataatttatccctcccttggttgaatagtcaagaatgctgattttaattcttctaacagctttatccctcagaagggaaggcaagcaagttatatatgtagtttatttgtaagactgatatgaaattggaagatgaatctactattagctttaattatttttacatttaggaatattgcatcagtaactcataattttggttttctgttatcctgagttaacacaaattatccaaggagatggcggatcatctgctttgaggtgtttttttttgagaattttaatgtatctgaatataaaaggtaaaaatatgccaactagcaatttctgcccattccagaagtttggaaatattactcattactaggaattaaataaaatatggtttatctattgttatacctcttttaattcacatagctcatttttatcttttatttttgtttgttttttttgagatggagtcttgctctgtcaccaggcaggagtgcagtgatgcaatctcggctcactctagccaccgactccctggttcaagcgattctcctgcctgagccttctgagtagctgggattacaggcaggcaccaccacgcccagctaatttttgtagagacaggatttcaccgtgttggccaggatggtctccatctcctgacctcatgatctgcctgcttcggcctcccaaagtgctgggattacaggtgggagccactacgcctggcccacatagctcatttttagactcacttccattaagtcttgtttggacccacgaacattgtctttttttttttaagatggagtttcacttttgttgcccagactgtagtgcaatggtgcaatctcagctcactgcaatctctgcctcctgggttctagcaattctcctgcctcagcctcccgagtagctggaattacaggcgcccgccaccacgcccagctaatttttgtgtttttagtagagacggggtttcaccatgttgggcaggccaggggtgatccgcccacctcagcctcccaaagtgctgggattacaggtgtgagccaccgcatctggccaacatgtcttttttttttttttcctttttaaccacaaagagacttaagcagtccttgtcacagatgatgaattgatgttgcaagtattgtcttagcttggattaattttcttgcttactgtaattttagataatatagctttgtaattagagattttatgtgtaaaccacaaaaatgtttacatgaaggccattattacagatgtgacgtgcataattattagtaatttgtatgtttacatgggtcagtctggcaaaaaattatgaagttttaaaaattaaaaaaaattataatgccagttttactggaaagtaaaattatttcagtaatcgattatagcaaaagtattgattttcattccagacaaaagtcagaatgaaaggtaatttctcaatactctttcagattaataaaagtacctgtagcgatttttatcattcacaagtatatcacaagtaagttagaatttgagaactgtgttctagatctctgaggagatgcagtcagatttctgaactgtctcagcaaatggtaagtaacttagagctagtaattaataacctgtcctttgatttctgattcagccaagaatggccatatttgggaaaggcagatctggagagtaaccacgttttcattcatttaccacttctaggcccctccagagctctcagatattttggggttgagcccttccccaaagccatacaggaccttttttttgtgatctgttctagccatttttatgttgggtgcttgttatggactgagcatttatgtcctcccacaccccccccataccttttttgaagtcctaacccccagtgtgatggtatttggagacagggcctttggaaggtaattacagttagaagaagtcgggagggttgggcccaggtctgattggattagtgcccttatatgaaaagacaccaggacgggcgcagtggctcacacctgtaatcccagcactttgggaggccaaggtgggtggatcacgaggtcaggagtttgagaccagcctggccaatgtagtgaaacaccatctctactaaaaatacaaaaattagctgggtgtggtagcgggctcctgtcatccaagctactcgggagggtgaggcatgagaatcacttgaacccgggagttggaggttgcagtgagcccagattgtgccactgtactccagcctgggtgacagagtgagactctgtctcaaaaaagaaaaaaaaaaaaaaagagacaccagagagcttgttagaagaggtcatgtgagcacacagttagaagaccttcaagccaaagaagaggcctgagattgaaacctaccttgcaggtaccttaattttggacttcccagcctccaaaactgtgagaaataagtttctgttaagtcactcagtctgtggtattttgttatggcagcctgagcaggtagttgttctttcagaaggtgttgataataaccacatgcaacaccaagtcacaaataataaaacagatgtaacttatattcatacagaaagttgggcactgccattgccttgttggtttacacggctgtgctagttcagtagcagaaaggtgctggtctcctttactcagtttacaatctaggcagtagaatgtaatcactgctttaaacttgatactgcttagggagagaatcattggtgctgggtaactttgggttctaggtttactttttgtgtatatataactgtttttggtaaatcacaagtttctgggcttgtcgaattagattttgttacagattatgagctttattatgctatacagttagttgtatgtatatatgcctttcccactagattttaagctttttttttttttttttttttgtgacggagtcttgctcttgtcgcccaggctgaagtggagtgcagtggcacaatctcggctcactgcagcctccacctcctaggttcaagcgattctcctgcctcggcctcccaagtaactgggactacaggcacgtgccaccacacccggctaatttttgtattttttgtagagacagggtttcgccatgttggctaggctggtcttgaacttctggcctcaggtgatccacccgcctcagcctcccaaagtgctgggatttacaggcatgagccaccacgcccagctataagctctttaagggttgtaaatttataatcattcttttactctcctgcaaattctgttgcacactgccttaatcaaggtagatgctgaatgcatttttgtataattgaatatgttgcaatccccaactctctccaactgttcctgtcaaagcagccactggattgttaactaatccatattagatggggttaattaatatcagatgggacaagtaagggctaataagattataggccaccaagtagatttctgtctagctcttatagagattgagtttattggacctgtttgataggaagttttggtgtttgggatgattaaaactgaagttcctatttattgaattatacctatttatattatttcatatcagtggtccacatgcaagtgaggcttctgagacagagtttgagttctctcttcaactaccataacacttaacctgtatctttttttttttttttttttttagacggagtctcgctctgtcactcaggctggagtgtagtggtatgatctcggctcactgtaacctctgcctcctggattcaagcagttctccatgtctcagcctccctagtagctgggattacaggcctgtgccaccatgcctggctaattttttttttgtatttttagtagagacggggttttaccacgttggccaggctggtctcgaactcttgacctcgagcgatcaacttgccttggcctcccaaagtgctgggattacaggcatgagccacagcgcccagccgtctttttttttaaatagcaatttaacactgttcacagttactcatgtacatgtcatgccatctattacactgtaagttctgtgagggtagctgtatcaaatttatctaactctctctagtatgcatgacatagtaagtattcaataaatatttgcatattagtgataaggatacaggttctgaatagtgggtccttaccatttaagaattagtatttgatggccgggcggggtggctcacgcctgtaatcccagcactttgggaggctgaggcgggcggatcatgagatcaggagatcgagaccatcctggctaacatggtgaaatcccgtctttacaaaaaaaatacaaaagaattaaccaagtgtggtggtgggtgcctgtagtcccagctactgctttgtgaggctgaggcaggcagatcacctgaggtgggaaattcaagaccagcctgaccaacatggagaaaccccatctctactaaaaatacaaaattagccgggcgtggtggcgcatgtctgtaatcccagctactcgggaggctgaggcaggagaatggcgtgaacccgggaggcggagcttgcagtgagccaggatcgcgccactgcactccagcctgggcgacagagcgagactccgtctcaaaaaaaaaaaaaaaaaaaaaattagtatttgatatttgatcattaaatatgaattaagaggacttagactttttgttaaatgtcaagctgggaaaagttgtcatttaaatgaattgcctcttatttaatttcgtctgatgatacattttgtttttattttgtaaaaaattattttttttctttttggagacagggtcttgctctgttgcccaggctggtcacaaactcctgacctcaagcaatcctcctgccttagcctcccaaaatgctgggattacaggcgtgagccacctcgcccggccttgtattatgatacattttgaacaactacaagtagacttggtataatgaacctgcacgtacccattgccaagttctgacaactgtctgtctatagccaattatgcatttcttaaattagaacccccccaatatacccaaatatatatatatgtgtgcatatatatagtaagttgtaacaaagttgtgaattcatacctgaagtatctcaagtgatgcaagttttatgaatttttgtttatgccttttgggaagagttgtattgacaaattttttatgcttaaagtaaaccataaatcaaaaaaataaaatctaggatgcaataaaacaaaacaacttcttgacataagtatggtatgtaaatctgttttgattggaaatcaatttgttatattgccagaattcctgttttagaatacatctctgctgatctgtctgtattcttagactgcatatctgggatgaactctgggcagaattcacatgggcttcctttgaaataaacaagacttttcaaattcttagtcgatctgcagaacctgtagccaggcactgaaccattttgatagatgcagtaatcgttgcaagtgtatatttcaaggagttctggctgggtcctagtttatgcttgtggcagaagcagtgagtaactgggaggaagttggtgagtaagcttcaaggaagaagtcatttttagtactctggatcttcctgattttaaagcactacaaaatggtgcattttcattcttgtcaagtgataacagatatattctgatgagcctgaaatgaatatatattgtatcatttttataatatctagcaaggtttgtattttcctagaacttgaactaaatttcagttcataaaatttataaaatacttagttgttgtaaaatatttttggaatgttcacataggtgacacacaaatgtcccattttcattctttctatagtaaatatgttctgatatgtgaaggtttagcagatgcatcagcatttaatcctagaggatctggcataatcttttcccccaagaatagaaattttttctgcttatgaaagtagtacatgtttctttaaaaacaaatcaatattgacttctgcctgctgtatagcactatgcctccacctggccatgaccaggggcatgtcctggtccacctacctgaaaatgtttgcaaccagcctcctggccatgtgcacaggggctgaagttgtcccacaggtattacgggccaacctgacaatacatgaagttccaccaaagtctgagaactcagaactgagctttggggactgaaagacagcacaaacctcaaatttctcagcactggaaacctcaaaatataactgaattccataaataagattttaagtcttaaatatgtatttttaaatgtattaaaagtcaagctgcttgtatttaagcacctaatacaatgcttaggttgtaaaaggagatgctcaataggtactaactgatatattgagatttaattatggtttgaccaatatttattggaaaccgccaaagcttaaatcatcagcttcttgaatgtgatttgaaaggtaatttagtattgaatagcatgtgagctagagtatttcattctttctggtttatttcttcaaatagactttgaatataatggtgaatgggtattataaattaactaataaaaatgacattgaaaatgaaaaaatatatatattaaagtgtagaaagtgaccaggcgtggtggctcacacctgtaatccaagcaccttgggaggctgaggcaggaggatctcttgatcccaggagttcaagaccagcctgggcaacatagcgagacttcgtctctaaaaaaaaaaaagagagagaaaaaaattttttttatttaaaaaaagtgtagaaagtgtcaagaccccacttcttaccattatttggtatatttctctatacccacccacccttcctccttactccctccctcccttcccaatctttttatctttttgtattctgattttttgtttgtatattttgctttaatttaatgtatcctttaaaaatttcccatacattttatatgtatatataaaaacgcatgctgccaaagataatttataagaaagaccattgaatttttttaaaagtgatatatattcattgaaaaaaatttagaatatatagcaaagcaataaagaactaaataaaattgctgtaactcctctttcaaagataagtgcttttatgattttgttgtatttttttctgtatataggtacatatatagtatttataaagctgtactcatagtacattttcacatcacaggtaccatatcagtgttattaaatattttgtatgccaggggctagacataccaagacaaccaatatgtggttctacttaaataatattagagtatcttttatgatgacacttcatgagttgactataataatcttagacttctaagagtttgggttttcaaaagatcacttagcttttttgggtgatttttcccccttactgtgagatgagagaggctgtttggatttgggattggggtagcggggacagcaacttttcttttctttttcttttttattttgaggtagggtattgctgtgtcacccaggctggagtgcagtggtgtgatctcggctcactgcaacctccacctcccgggctcaggtgatcctcctgcttcagcctccccagtaactgggactacaggcgcgtgccacatgcctggctaattttgtatttttagtagagatggggtttcaccatgttggccaggctggtctctaactcctgacctcaggtgatacgcccacctgggcctcccaaaatactgggattacaggcatgagccgctgcatcagccagcagtttttcttgtggttttttttgtttgttttgttttgttttgtttttgagatagggtcttactctgttgtccacgctggagtgctgtggtatgatcgtagctcactgcagcctcaaactcctgggctcaagtgattccttctgcctccgcctcccgagtagctgggactacaggtatgcaccaccatacctggcaaatttttacaaagttttttgtagggacggggtcttgctacattccccatgtcggtcttgaactcctggcctcaagcaactctcctgtctcagcctcccaaagcactgggattacaagtgtgagccaccacaccatgccagtttttcctgttcagtgtgatattttatcttgttagactacagtgtgttaaaacttgttttactaaattttcaaacatactcaaaagtggagagaatagtataatgaatacccgtatgttcatcacccatgtttagaatattattaaatataaagattttgctgcgtttgtcttagctctttaaaatttttctttttctctttgtgacctaaaggaaattccatatcttatcactttacttctacattcttgactaagatgactaagacatatagttacatggttttttgttttgttttttgttttttaaagacgaaatctcgctcttgtcccccaggctggagtgcaatggtgccatctcagctcagtgcaacctctgccttctgggtacaagcgattctcctgcctcagcctcccaagtagctgggattacaggctcctgccaccacgcctggctaatttttgtatttttagtagagacggcggggggaggtttcaccatgttgacaaggctggtctggaactcctgacctcaggtgatccacccgcctcggcctcccaaagtgctgggattacaggcgtgagccaccgcgcccagcctgtttttttgtttgtttgttttgttttttttgagacagagtcttgctctgtttcccaggctggagtgaagtggcgcattcttggctcactgcaaccttcacctcccaggttcaagtgattctcctgcctcagcctcccaagtagctgggactacaggcatgtgtcaccacacccggctaatttttttgtatttttagtagagacgggatttcaccgtgttgcccaggctggtctcgaactcctgagctcaggcagtctgcctgcctcagcctcccaaagtgctgggattacacgtgtgaaccaacccgcccggcctgttgttttcttacataattcattatcatacctacaaagttaacagttactaatatcatcttacacctaaatttctctgatagactaaggttattttttaacatcttaatccaatcaaatgtttgtatcctgtaatgctctcattgaaacagctatatttctttttcagattagtgatgatgaaccaggttatgaccttgatttattttgcatacctaatcattatgctgaggatttggaaagggtgtttattcctcatggactaattatggacaggtaagtaagatcttaaaatgaggttttttactttttcttgtgttaatttcaaacatcagcagctgttctgagtacttgctatttgaacataaactaggccaacttattaaataactgatgctttctaaaatcttctttattaaaaataaaagaggagggccttactaattacttagtatcagttgtggtatagtgggactctgtagggaccagaacaaagtaaacattgaagggagatggaagaaggaactctagccagagtcttgcatttctcagtcctaaacagggtaatggactggggctgaatcacatgaaggcaaggtcagatttttattattatgcacatctagcttgaaaattttctgttaagtcaattacagtgaaaaaccttacctggtattgaatgcttgcattgtatgtctggctattctgtgtttttattttaaaattataatatcaaaatatttgtgttataaaatattctaactatggaggccataaacaagaagactaaagttctctcctttcagccttctgtacacatttcttctcaagcactggctatgcatgtatactatatgcaaaagtacatatatacatttatattttaacgtatgagtatagttttaaatgttattggacacttttaatattagtgtgtctagagctatctaatatattttaaaggttgcatagcattctgtcttatggagataccataactgatttaaccagtccactattgatagacactattttgttcttaccgactgtactagaagaaacattcttttacatgtttggtacttgttcagctttattcaagtggaatttctgggtcaaggggaaagagtttattgaatattttggtattgccaaattttcctctaagaagttgaatcattttatactcctgatgttatatgagagtacctttctcttcacaatttgtctcttttttttttttttttgagacaaggtctctgttgcccaggctggggtgcagtgcagcagaatgatcacagttcactgcagtctcaacctcctgggttcaagcgatccttccacctcagcctcctgagtagctgggactataggtgtgcgccaccactcccagctaatatttttattttgtagaaacagggttcgccatgttacccagcctcccaaagtgctgggattacaggcatgagccactggcccagtttctacagtctctcttaatattgtatattatccaagaaatttcatttaatcagaacctgccagtctgataggtgaaaatggtatcttgtttttatttgcatttaaaaaaaattatgatagtggtatgcttggtttttttgaaggtatcaaattttttaccttatgaaacatgagggcaaaggatgtgttacgtggaagatttaaaaaaaatttttaatgcatttttttgagacaaggtcttgctctattgtccaggctggagtgcagtggcacaatcacagttcactccagcctcaacatcctgcactaaagtgattttcccacctcacctctcaagtagctgggactacaggtacatgctaccatgcctggctaatttttttttttttgcaggcatggggtctcactatattgcccaggttggtgtggaagtttaatgactaagaggtgtttgttataaagtttaatgtatgaaactttctattaaattcctgattttatttctgtaggactgaacgtcttgctcgagatgtgatgaaggagatgggaggccatcacattgtagccctctgtgtgctcaaggggggctataaattctttgctgacctgctggattacatcaaagcactgaatagaaatagtgatagatccattcctatgactgtagattttatcagactgaagagctattgtgtgagtatatttaatatatgattctttttagtggcaacagtaggttttcttatattttctttgaatctctgcaaaccatacttgctttcatttcacttggttacagtgagatttttctaacatattcactagtactttacatcaaagccaatactgtttttttaaaactagtcaccttggaggatatatacttattttacaggtgtgtgtggttttttaaataaactccttttaggaattgctgttgggacttgggatacttttttcactatacatactggtgacagataccctctcttgagctacatcggtttgtggggagtcaaaagtcctttggagctaggtttgacaaataaggtgggttaacacttgtttcctagaaagcacatggagagctagagtattggcgaattgaagaaatccccctttttttttaacacacttaagaaaggggactgcaggtatactcaagagagtaagtcgcaccagaaaccacttttgatccacagtctgcctgtgtcacacaattgaaatgcatcacaacattgacactgtggatgaaacaaaatcagtgtgaattttagtagtgaatttcattcataatttgatcgtgcaaacgtttgatttttattactttagactattgtttctgattttatgttgggttggtatttcctgtgagttactgttttcctttaaaataggaatttttcatactcttcaaagattagaacaaatgtccagtttttgctgtttcatgaatgagtcctgtccatctttgtagaaactcgccttatgttcacatttttattgagaataagaccacttatctacatttaactatcaacctcatcctctccattaatcatctattttagtgacccaagtttttgaccttttccatgtttacatcaatcctgtaggtgattgggcagccatttaagtattattatagacattttcactatcccattaaaaccctttatgcccatacatcataacactacttcctacccataagctccttttaacttgttaaagtcttgcttgaattaaagacttgtttaaacacaaaatttagacttttactcaacaaaagtgattgattgattgattgattgattgatggtttacagtaggacttcattctagtcattatagctgctggcagtataactggccagcctttaatacattgctgcttagagtcaaagcatgtacttagagttggtatgatttatctttttggtcttctatagcctccttccccatccccatcagtcttaatcagtcttgttacgttatgactaatctttggggatttgtgcagaatgttattttagataagcaaaaacgagcaaaataggggagtttaactttaatattttcttttaaaaagcatttcatgttataagatcaattctgagtggtagaaatgctttgacattttatttccattttctacttttagtttttttcctatttgtttaagatcttagaggattattaagctgaactcctcaactgataaaaagcatgacatcttaaacataagcaaagcatatttttaggttaattttcacatagaaaacagtttattttatgtgaaattctatgtagatatactatttttttggtatttattgatatgtttattttattttattttattttattttattttattttattttatttatttatttttttttttgagacagagtctcactctgttgcccaggctggagtgcagtggcatgatcgtagctcactgcaacctccacctcccgggttcaagcaattcttctgtctcagcctcccgagtagctgggactacaggtgcctgccactatgcccggctaatttttgtgtttttagtagagatggggtttcaccttgttggtcaggctggtctcgaacccctgacctcaggtgatccacccacctcagcctcccaaagtgctgggattataggcatgagccaccgtgcccggccgacatgttaattttttaaaaaaggctttactggggtatattttatataatataataatcacatgttttaactatacaattccaagctttttagtatatttatagggctatgcaaggaagatatactgttaaacagtagaaattgagaaagctcttctgataatatctcttgatttgatgatggctcatgcctgtaatctcagtgctttggaaggccaagacagcagaatcacttgaggccaggggttcgagaccagcctgggcaacacagcaataccctatctttacaaataataaaaatatctgttgatttgaagtaaagtttttttttaaagacaaggtctcattctgtcacccaggctggaatgcagtagcaagatcacagctcactgtggccttgaccttctgggctcaagtgattctcccacttcggcctcccgagtagctgggactaacaggtgtgcaccaccatggctggctaatttttttttatgtttgtagagattgggtcttactgtgttgcccaggctgatcccgaactcctgggctcaagcagtcttcctgcctcagcctctaaaattgctgggattacaggcttgagtcaccatgcccagcctgaagtagcatttctaccctgtttaataattcagcagcttgtcatgtaagatattcatatatgcatataaaacattaggcagcttaatttggtaaaactgtaaaatggaaattttaaattgtttgcagcatcaataacattgatgtcagtatgatttttacatgctgatcttgaccaatttgaaacagtgagttaaaatctggctgatccgtactaatcctaaagaaatattctatgaactattaaatgtttccagaatatataaagaaacattatgatgtcaacacacccatctatttttttttggaaataaaaactccatttttcttattaaagaaaacatgcttattagaaaacatacggctgggtgcagtggcacacatgtaattccagtgctttgggagatcgaggtgggagaatcacttgaggccaggagtttgagaccagcctagacaacataatgagaccccctctctacacaaaaagaattagttgtgcatggtggcgtgcacctgtagtcccagctacttgggaggcagaggcaggagcatcccttgagcctaggagtttgagactgcaggagttcgagactgagtggaatgcagtggaactgcattccagcctgagtgacagagggagaccctgtcttaaaaaaataagaaagaaaacacaactgcagaaaattataaaggatttaagtcattccaaatatcactgccactttttatttagaatattctaaagaattctctctctgtgtacacacacacatatgcgtactcttaatccaagtagcttggtaggattttatttacctagtgcctagatgggaaattgcctggggattccaaatacctatttcattaaattaaagatgtcactgattttaagacttaacactatttttcatactgccaagaaagaaaacactaccagttataaatgtaaattgccatcaattgtaatacatcaattttagagctattattaataaaatgtgaatgtgcatcttagagcaatgaaatatagtactatatatttgatgaccttttctgccctgtgatattcagaaagtgaaagttaaatatgggctgagcatggtggctcacacctgtaatcccagtactttgggaagtcaagacgggaggctggcttgaacccaggagttcaagaccagcctaggcaatgtagcgagacgccatctcaaaatattaaaaataagtaaataagtaaataaaaagaaggttaagtatacaaatgtatttcctttgttgtgaatttatttcaattttatagtgattttttttttttgagacgaagtctcactcttgtcccccaggctggagtgcgatggcgtgatctcagctcactgcaacctctgcctcccaggttcaagctatactcctgccttggccccccgagtagctgggattacaggcgcctgctaccatgcctggctaatttttgtatttttagttgagatggggtttcaccatgttggccaggctggtctagaactcttgacctctggtgatccacccgcctcggactcccaaaatgctgggattacaggcgtgagccaccgtgcctggccagtggttttttgttgttgttgttgttgttgttttgtttttgtttttgtttttgttttgagacaggatcttgctctgtcacccaggctggagtgcagtggtgccatcttggttcactgcaacctctgcgtgggctcaagcaatcctcccacctccctttccagagtagcggggaccacaggtgtgtgccaccacacctgactaatttttgcatttttttttgtagaaacagggttttgccatgttgcccaggttggtctgaaactcctgagctcaaacaatccaactgccttggcttccctaagtgaaattacaggcatgggccactgtacccagtctagtgatttttttatttttatttttattttattttattttatttttttaccaaaaaaacaacaaagcctcaggaggaaaagttgatacacaagtaaattttattggaaatgtttttgtgtggaccttaagcagagggaaaattagtctgcattatggtgtatccagactaaatgactgatattaaaatgaaattattcttaggatttgcaatcttagagaaaactttttcatttttatttttttgagttacaaattatcttcatttacatttgagaacagtgagtcacagagggattaagtaacttactcaagatcatacaagtctttgatttgaacccaatcttttaactctgcagaactcagagtcactcttatttggaaaaactttttaactgatgtggatcctctaatatgggcttcctattattcattctctattagtcagaagttttgcaagcagacagaattcattttgccaattacgggattttccctcagttgcagtcaaggttcataaaactataactctttatctttaattagaaatgtttttttttttgagacaaggtcttgctctgttgcccagactggaatgcagtggcatagtggcccattgcagctttgaactcctgggctcaagggatcctctgcctcagcctcccaagtatctgagactacaagtgcgtgccatcacccatggctattttaaaaaaaaaaaaaattgtagagatagggtcttgctgtgttgcccaggctggtctcaaactcctggtctcaagcaatccttctgccttggtctcccaaagtgctgagattacaggtgtcagccgttgcacctggccaaaacgataacttaaaatacacacacacacacacacacacaaacacatatgtgtatttgtgtgtgtgtgtgtgtgtgtgtgtctcaaaaggtatcaaaagagaatagctataactttagtgttgatcttgatagtgacttgattaggctctgtttaacatcaaagatgcaaattaatactttctttgaacatattaaaaatgcagaaaatattggagtattttattttaaataaattgtattctgtatatttaaggtatacaacatgatgttatgggatacatataggtggttaaaagattactgcagtgaagcaaattaacgtatccctcaactcacatagttacccattttttttttgttttggtggcaagaggagcttaaaatctcatttagtgtgaatcccaaatacagcacaattttattacctatatacttcatgttgtacattatatttctagacttgttcatcctacatatctgctactttgtatcctctgagctacatctccccattttctcacttgccccccaagtagtttcttaaagtgtctcatgtaagagggcagtagctttcagcttaaactttttctctgtatgtagtcgatttctttgaggtatacttttctctccagaatagttagatgtaggtataccactttgatgttgacactagtttacctagaacttatcttctgtaaatctgtctctatttccatctctgtctccatctttgtctctatctctatctgtctatctctatctatctatctatctatctatctatctatctatctatctatctatctatctaaagcaaattcatgcccttctcctatttattgaatcgagaccatagacaggggtgagagaaagaatttggcaggaatggggatgtgtattatctgtggcataaggaaactttacagaactaggttcaaaagtatactttctagttctttcccatggcttttcactttgatgtagtccttatcaggtaactgaggttttatataagtcccctgattcttagaacatgaaggtgtagtagtcaaggttggtcccttgaaaccacaaattttgtgaaaaaaaattaagaaaattgaataatttcctcagcaaatacatattgatcatctgttatacagccatgagaagtggttctgttgcacacgtttattttatcagatcctaatcccaaaccaggcataaaatggaaaccatgaagataggatgaaataacttctgaatgtttgaatgtttgaaaatagtgtacttaaaaataccaggtggtttttgtttgttttttgtttttttctttttttgagacagggtctcactctgtcacccaggctggagtgtagtggtgcaatctcatctcattgcagtcttgacctcccaggctcaggttatctcccacctcagcctcccaagtagctgggactacaggcacatgccaccacgcccagctaattttttgtattttttgtagagacggggtttcaccctgttgcccaggctggtctagaactcctgggcttaagcgatcctcccacctcagcctcccaaagtgctaggattacaggcatgagccaccatgcctggcagaaaataccaggtttttaagtatcagcacttactcttcaatcttttctattactatgttgtgctaaatggtattttttatttaattagagcaatgctgttcaatagaactttctttgaggatggaaatcttttatgtttctgctatgtggtacagagccactagtgacatgtggcttttgagcgcttgacacatcttgtgcaacacaggaactgaatttttaagtaatttatattgccacatgtggctaccgtatgggacagtgtagtactagatgatctgtaagggctgtgcttcatcagtgtcgttttttaactgacaaaaacctttagttttttttttagtaatgtgtttatttaaaagaattcataaaatacaagtaaacaaattaacttgttacctgagcatatgtcctttcatacttattttttctgcatacatattttggaaaatggaatatctgccctttttttttatctgagatacagtctacctctaaaaatacatgattctaacattctcacttttgttggcatttgatcagggtatagaaaaacagttaaaaggacagagaatggttgagagattatgatatgaagagaaaatgtgattgagtgtggtagacttggggcctgcttgaatgttgagagaatgactgttttccgataaaaaaaaaaagtccattctaggatcctaaaagaagggtctgaagttcactgcagaaagcaagctacatagtactaagccactaaggggacatggagcccttagtaattcctaccttagtaatagtctcatcatgccctcttgggaacccagccttgttgattagcctctctgctttctctccttatagttcaacctccctgtttgttccaagcagttcttttcctgcccatttattatgcatttctatacagctttcctcctctttttctataccatgctgcagttcttattgctacctagaggttttcaaaattcctaggggcggataagtaggcataaacaaagttcttccctattatccttcctattttttcacctagactgaagaggtagacaaaatagaaataaagacattaagggtatgtgtttgtagtcccaaagagcttctctggcaattttatgtagttgacagtgacgctctgagttcaggacagattggactccttggctgagaggagtgaggagataggacggtagaggagagggtagagcaactctggaggaagctttcccctcacctttgccagtcctgttatcctagacttaaccataattaaagatgagggaggcactcagtaaagggatctagtgggaagcttgttccagacagccaaggagggaggttcgcgcagttcctttggccacccaggtggggtaattgatccatgtatgccattcatgtacaatgtaggcacttatacctgtattccaatgtagtgaactataccattactcttaaattaatattctttattagcttccatggtggctataggccaggcaagagagttaagaaaaaataaatagccaggtatggtgactcaagcctgtaatctcggcactttaggaggccgaggcaggaggatcgcttgagtccaggagttcaagaccagcctgagcaaaatagtgagatcctgtctctattttttaaaaaagccttggggcaaacaggagtatggaggtttggatgctaatagaacagcagtgtcttactgcttggagttctcttgtttcttgtcctatcaccgtagcctttggatcacagcaatttttccatgactccatacttttcagttcttgaatattttttcctttattcctcttgtctctgtaaagacatcaactggagttggactgtaataccaggtatctccagaagatggcactatttaacagattttataaataatttgatgtgagtcactgtcatctgaagcttgttgccttttctttctttcttctttcttttttttccccatcaattctgtatgtttgaaatgctgggttttaagttagttagaataagggatgtctgtaatttccctaaattgagaagtaatatgcaaaggttgatatcagaagtcatatgctcaccttgcaacaccaaataatactggcccatttgtgatttttgaaagtaacactccataataaatggatgtatatatagaagcataacaaaaatagaagcacataaaagtgaaaagtctcataaacgccattgtcactactcatgtaattgctgttacaaatttgtttaaatgttgaataaaaatggtgtcataggcaacacagtgttccactacttggtgtttttaatagcattattctgtctcagtgtgctttggattatcaggtgctttttaatagttgcatggtattacattgtgtagatgaacttgattaatttaaatggttccctgttaatggacatgttggtttgtttttgtgaacaactgatacagtgaacatttattttttaaataaaaaaaagagagacagggtcttgctgtgtttctcgggctggccttgaactcctggggtcaagcgatcgtcttgcctctgcctccctgggattacaggcatgaagccaccgcacccggcccagtgaacactcttgaatgtatctttgtatacttgtcagtgtttttgtagcattgattcccagaagtgggattactggattaagtgacatgcatgtttgcaattttaacaggtattgctatgtcattttcaaaagaagctatgccaattaatactctcaccaacaagagtgcttatttcccctcagcatattatcaggcttaagttttgccagtatgggtgggagaacagtagaatcacattgttttagtgtttgtttctcagatagatataattttacaccttataaccttctcttctataaattgtctatttgtgttcattctccattttcctatgggttcttattgttggagcccaatatataaaagggggtatttgttacagaacctcttcagttttggttcatgtcatgcctgggtttttaccctttctacggatgttaaaaaaaattctctattttcttccagtccacttatggctttattttttacatttagattttaatccgtctggaatttatttttgtgtatgctgtgaggtagggaccatacttttattttttcccaaatgggttactagttggccaaacatcatttattgaataattcatcttttccctactgactcgaaataccatctttattgtatactaaatcctcatatagttctgggtctgtttctgggctctactttgttcatttactgtgctggtactgcaccgttgtaattgctgtggctttgtggtatggtatggcttgctctctgctagggcaagtcgaagctcttttgttcacctgctctttcacccaaattttctgtcctgaatccagcacagccaaattatggtcattgtcaccaccaactacagtgggtgttgagcatttcccattgaatctcctgtaagggttttattggattctgtgatagcagtaaaatgggagcctaagaggtattccttaaaggactactaatcagacctggtttcccagatgatgctgaagatgacggggcctgggctagacttttgagggacatatccttggggttgggtgtgatatagaccagcccttacaatttgcttgactcatgggaatcgtacagggccagaaccagacacctgtcatgctaataacttccctcacaattcagaaatcactgtgattgaagatgggtggctgttataatactacccacttaaaaatggatgtaacccattttttaggactcttaaaaacatcaaatcagtaatggccgattaggactttttaatttttactaatctctacttgaaagttttctagtcattcatttcaggaaacctaattcttataattcatatcatttagaatatcataatgctatggatattagctagctaacttctcaaatcttctagttctcatttaatttgaagtttgtgtgtgtacataaggatatacatatacatatgtgtgtgtagatatatatatatatagttttttttttttttaactagaatgaccagtcaacaggggacataaaagtaattggtggagatgatctctcaactttaactggaaaggtatgtatcttgaaagggaagaaaaaaaagcacttcataccgagtcaattagtaacagtgtgctttcaatcaatcactaagagataatttacatagtataactaaatgggttatttaacccttggaagcagtctaggttaattatcgttccctaggtcatgtagtaaaaagacagtagaatccaacattaaccttaaatgtccatattgtcaagtactgctgtctgcctctgtgggactctaatttgggatccttcaaaaaacattgatgggggaaaagatagcctttaaaaaaaaaaaaaaaacaaacctatgtgagtctatgtgaggtagactcacatagtttcctaaaagatagcaaagcagtattatgtagtggctgaaagtgtgagttccggagcctgacaactgattcaaagcatggcttagtacttcctaactctgaccttgggcaagttacttaacctctctgtgtcccatatgtgattagggtgaggttgataatagcagccatagagttaagaggattaagtgctataatgcaagtagagctcttacaacagtttctggtaaatcactcaataaattcagacatactattattttaagaaatctcaaagagttttcttgtaccttaaaattctcctagtgtgaaccattggttttggtatattgtgcttccatgtagtttaatatcaagatgtttttagatttcccttttaatttatttgttgacccattggttgttcaggagcatgctgtttacctgaaaataatggagatattaaggtatttgaatatttatcttctagtacattgaaaaactttttgagagtaaccaataataaatgatggaatgctactgctttttttttttgaagctgccagttattgtttacttacactatgccaaatataaaggcattaatctcataaaagtttcacaacaatcctgtgagggagacgatatccccattttacaaatcaggaaattaagacttaataaggttaaaagacttgcccaaagtcacagaaccagtaagtggtagagcttgaatttgaatacagacctgactctaaagctcttttctttctttagattttagtgttcattgcttacttgaatgagtatctataagaaaactttaacatgtaaaacttctgtgaaattatcttgtcccatatcagggtcatgtcaaactaatgtcctcctcagcatctttggaaaacttcagaggagaaatgagctttgcccctcctgttcatttcatataccactgttagacctgtccttccctttcagcatgctttgtccatatttagaagctgttgaagccattacttgtctggtcagtttttagtgctggaatggacctagccttttaggccttctgagatttagtttgatctcgtctttcccacctaatggctctgttctactacatagatttgatctgaaacagttctctgtttctaaaataactttcttttcatgatagtcacagtaaagtacatttattatggaaaaatcaataagtataacgagtgaaagttatttcttggtggtaagattatgggattatttgaactttctgtttcattgtattttatttatttatttatttttgtgatggagtctcactctgctgcccaggctggagtgcagtagtacgatcttggctcactgcaacctccccttcccagttcaagtgattctcctgcctcagactcccaagtagctgggattacaggcgcacgccaccatgcctggctaatttttttatctttagtagagacagggtttcaccatgttgaccaggctgatctccaactcctgatctcaggtatccacctgcctcagcctcccaaagtaccgggattacgggtgtgagccaccctgcctggcctcattttgtcttttgggggtatttttgtgtgcagatatatatgtatataaatatttttccctcttttccccagttagtatttgagcagatgaactttggacccgaatacctgtattcaagtctctaataccacttcttggctattttcattttatcaaatggcctcttatcctcgtttttctcatttattaagtagagatgtaactacttgatataattcaaaaactcaataatggcattcttttgttttttagactctagtgtctgtactcgttgtaccatgctgggattcatttgaacaattgcatggcttttttagtgtattattaaatttgcagtttacttagaatttactgggacctcatacaaatgggaaaaaaacataactgtgttactcatttgctgtgtgcctttggattgaccctattttttgtattcattttctccccatgtcctgagttccactttgaataaaaagtaatttttttcctgcctgtaaaataggctaccaataggctgcagttgtctatagtagctgcttcactgaggagagctcagcatgagagaaatagtatgaattgcttgccacaagttatgggctagccttacttcattctgtacttggacctgtttaggcttctaagagatcttacctccaacaataaactgctttgagacatgaaaaggtggaagctttacttggttataactttacttttaatacctagaacagtgagtcttcaaacttgtatttgcatgcccaatttataaaaagtttcctgagcatttacccctaatatatgcattttaaattatatatgatttatggtaataataatatatatgttacaaaatacatacaaaaatatagattaaacaaggtgaggtaaaaaatttaaaagttctaatctttcttgcaaaccagtggatcttttgtgccttactctggtaaacactgtcttagaagaatatatagaacattaaaatcttaatgctatagttatatgacagagtatgatgagagctacagataaacaacacatcatgaatcttcttgtggcagtgtttataaccattatgtgaaatgctgcctcattcttataactagcataagaacagataggactttctcgattttgaggggtaattattagatggtattttctgttaaggactcttccagctataaaattcttaaatgtagaaagcgaagtgagggtttatggtgagaggaagcattggtatcatgttttagtgtagtccaagaatatggacacatccagaaaatgcagatcaagtttagcctaatgagaaaatatattttggagtccatatggtaaattaaattatgtgatttttgagttattgtacaaatataattcttagaatgttagagtcaggagactataagagaccaactgcttcaagtttcatttaacacatgggaaactaaggccagagaaatttcaagacttgcccaagattagacctcttgttaagtaatgaaagtgttttaaaaacaggtgggtcaaattctgtttttaaaatttccattatgatgaaaatttcagtattacaggcttccaaatcccagcagatgggccacttgtttaaaggagagtttgatataataaagcatctaaaaacaagagtttggataattccttagggttgttatgatgtgatttgacttataattggaaataccgttttattcattgtactgattttcatttctctttttcttctagaatgtcttgattgtggaagtaagttcacatttacttttaatataacatttatgacttttctaacttagtatgcaccatcctaaaggtaagccagggagagaaattcctctgcatcagttttaatggtgggcttgtgttctaaaggagtgagattggttttttgtaaagactacttagtaatttgtttttaccaataatggaatggtatacttcctacctctctttttttagtttgaagtattttctttctaaacataactctctctctctatttatctatatataatatatacatatatatcttatattttatgtatatatatatatatcttgcttagattttgtcttatgtaatatttggtacataaaaaataatatttataatttatagactattttccatgtgttattatgtgctaaagtattttgtatcttagcaccgagaggctaagcagtttcctagggttaccagctagtaaactaagggaaacctttacttcctttagctcagtggttctcaaaatgtggttccctagaccaaaagtattaatatcagacaagaacctaccgaatcaaaatatctgtgatgaggcccagcaagctatgctttaacaagtttccgagtgattctgatgcatgctaaggtttaggatcccttgtttttactcataagtcactttctcattaaggccttccctggccatcctatataaaatctcatgttttcacaccgtcaacttcgtattcctcctcaatacttttattttcctgatcacttatcactaacagcctctctctctctctctctctctctctatgtatatatatatatatatcacttatcactgtctaacagcctctctttatatatatataatctatagattatatatatatgcagcattgtgcaatcattatcacgctcaattttaaaacattttcattgccccacaaagaaacccaatccccttagccatcactccccatttccccttcccccagcacctagcaaactgatcatctacctacttgctgtctataagatttgcctattctggacattttgtataaatagaatcatacaatatgtggccttttgtatctggcttctctcacttaatgttttcaaggttcattcatgttgtggagtatatctgcactcatttcctttttattgccaaattgtatggatagacaggtgttcctcaactgtgtcctgataaacccatctgaagttgaaaatatcataagttgaaaatggatttactactttgataaatctatcctaaagtcagaaaaatctcatgttgaaccatcgtaagttggataccatctgaattacatttttgttatccattcactggttgacagacgttaggttgtttccactgtttgctccttatttctcgtacctgaaatgtccttattccctcccttcttatcccatgtttaagtcatttaagacccagctcaaacgtcacctccacaaaaccttccttgatacccctttcctcttcaattcacttggaccttttgcatttaattttaatttttattttttttaagacagagtctcactctgtcaccaggctggagtgcagtggtatgatctcagctcactaactactctgcctcccaggttcaagcaattctcatgtctcagcctcccaagtagctgggactacaggtgtgcgccaccatgcctggctaattgtgtgtgtgtgtgtgtgtatgtatgtatgtatatatgtgtgtgtgtgtatatatatatatacacacacatatataaatatatatacatatatatatatacacacatatataaatatatatacatatatatatatacacacacacacacatatatatatatatagttttttttttttttaagtagagatggggttttgccatgttggccaggctggtctggcctcaagccatcctcccacctcggcctcgcaaagtgctggtattataggcatgagccactgtgcctggcctgcatttcattttaattataaaatattttgaactcagaaaaaagggtatgctgaatacctacgtacccacaaaagtattaacattttgccatatttgcttctgatcttattttttttgagaaattaaagatcataatacaactaaagccccatttctttcccttcattcccagaagtatgacaattatccttaaagttgatatatatcattcccatgcatgttttttatacttccctagtacaagttagctgtatcctctgctcaggggctcatcaagctgaatcaagggactcatgatcctcttcaaagttccttcaggttgttggcagaatttagttccttgtgattgtaggactgagggcccgttttctcactggctgctggccaggggttgctcccagatatttaaaggctcatgccctagcccatgacagtctcacaacatggcagctgacttcttcaaaaccagcaggagaatcttgctctagtctaccacataacctaatcacaggagcggctatcccgttattttcacagatcctggtcacattcaaggggagggaacccttctgtgtgtgtacaccaggaggcaggaattttttttttctttttcttttttgttaaaaagtcttaaagtcttttatccctaaaggaggcaggaattttgagagccatcagaattctgcctaccacagcccagaaatctgcatttttcacaagtctccagccatgatgtttctgatggctcacactgctttattccatttttaaagagtatttttattgaaaagcattagggttatggtttaaaaaatattttccctaacaaagatgggtttgtttagagtcctacttttgactaaatagctgagattcacttttatgtaaagtcattttatagcgttattaatttgggtgcctttaaaaatagtataaagcatgtttctcgagtgtagtctgttagccacctatattggagagttgggaggagagagtctctatcttgaatttatgggaaaaattctaaaatactttttataatgaaggacaacatcataactccctaataaaatgtgcatgtatatattcaaatttgctgtcattgatcctgcacctacaaaatccagtcctgggggctggcattcttactgcttgctgagggccagatgatatagattccagaatatctccatgtagattttggtgagaattactgtgctgaaaagaatgacagtattgcagttatacatgggggttttggtactttatattgtgactctgaatttaaagctatgcaatgtcttcttttttgaaaggatataattgacactggcaaaacaatgcagactttgctttccttggtcaggcagtataatccaaagatggtcaaggtcgcaaggtatgtatgacattttgacacagaatattttcctcatttgaagggggattaagtgattgcttctttttaaggataaatgttttcaactgtcattttatcttcgaaaagtaatgtaatctcatataagacttaagatataatccttttaaataattttgtcatgtgttaataaagctcataattacagtcacttccttgcctaatattaacatttggtttttcagcatgctaattatatcagtttgtcctgaatagcatggcagaggattttgggcccccttgcaaaattaagaataaggattccaaagcgggtgaggaagtgataggaaggggtgggccctgaagatctggacctcctggaattgagtgatgaatgctgcatcttctttgtgtctgtagtgaaattttataatgcctgcttccttttttattaagtcggcctcacctcctcaccttacctatgctgttttacttttgcttttatagttctacctgtgtttatttctcattttcgtttcatctctcaacaactctggggtggcattattattcccacttttcagataaggttactgaggcatagggaattgtccaaaggtacagagctagtccgctatagagatgagatttgaacccagggaacctggctcacagtttatgcttttgctaccttaagtttttaatagagtgacatcaaacaaacatttaagaatatgtttttcttttccttttataatttcattaaaaacattaagtctctgatcagtctgcagtttttatgtaggggtcaggtaatgttctaacttctgctttttcctaagtgattaacaggtttttataagcccttttgaaaaaatcacggtatctgtcgagcatctttgaatcagagtaagccttctagtgagtcatatgtcagcagtttgactgtatgggcttttctaatatccagttcaagtgtttatcagtgagtttttcttttaaatagatttgggacaggtactatgagagtatataagtgatacgttataggacactaactagtatcctatgaaatggcaaaaactgcaatcacttttgcaccaaccaaatagaaactaatcagtgcacttgcttatttttctacatgctctttagggttttaaatgtcaacctactgtggcatagactttaatcctctgggtattcttttgttgttctttcctggtatatgctgtggaattgagatagactggttcgtgagcgagagattttgtgttgccacaggtaggacatgctcaaacaatacttgggtcatttcttgacccaagtcatctattcaccatagttttgtagcaccgatcttgcatacatttcatgtatcttctttgaaccccacgtcagtgctgcttatatgatactcagaaattaaacactaaggaataagattttcaggtaggattgagttttggagggtcacaaatcttgtaatgtctaatatttccactctccctgctgagaattagttttggcttccttggaggtgatatcgcctctgttgagtataagtggcctactgtgatcacaccactgcactccagcctgggtgacagagtgagaccctgtctcagaaaaaaaaaaaaaaaaaaagaatgcatggcctagatgacttctaaggtttttcccacccagttccagttttcatgttctaggcagagcagtaaagtgagaaacacatggacttgggagtttagtctcgcatttcactgccacttaatctgagcgactattccatatttaatctctctgaatgtatttactcatctttaaaggggaatgattattaacatctttttctcagggaaactatatgagtcaaggagataatatatttgaaaatctttttaactgcaaagcgctgtttcactgttggttataatgtgattgatctcattgtagtgagcagctgcttaattgcgttttagaatgtagggaagatagtaatatttttcacattatatatgtagctggttctggaactgtaaacatactccttttttatggagatctgagtcacgtaccataaaattcactcttttaaagttgtacaatccagtggtttttgatatattcagagttgtgcatctgctaccactatttcattttggaacccaaagaaaccttgtacccattagcagtcattctcccttctcccagcccctggcaactactaatctactttctacagaaagtccgtacagatttgtgtattatggacattccatataaatggactcatgcaatatcctgtcttctttcacttagcatagtgttttcaaggttcatctaggttggggcatgtatcagtacttcatcccttgttttggctgaataatatttcattgtacaaatatatcacattttgcttatccatctgttggtgaacatttgagtttctacctgttggcttttatgaataatgttgatttgaatgtttgtgtacaagtatgaatacctgttttcaggtctcttgagtatatagttgctaggtcatatagtaactctgtgtttaacattttgaggaattgcccgactatttaacaaggtatatgtactgttttacaccagtaacatatgagggttccaatatctccacatccttgacaacacttgttactgtcctttttattgtagccatcctagtggctatgatgtggtatctcattgtggttttgatttgtgtttctctgatgctgatgatgttgaacatgttttcatctgcttattggccatttacatatatcttcttaagaacggttacccatttacagtatggaaaatgcttcagatgcaactctagtcatgccttagagatggagctttattaaacattcagatctctaggcatatgaagtgctgagttctcttgaactcctaatacagattgcactgagtttagtgataccttttctggagcattcctgagttcaggtagggagaagggtttttgctgtgattggcttgttatgttctttctaaatggaaatagaattgaagtgtctcctctctccatttattggaagagtcatgagggacataattagatgatcccttggagtctccggcttaggtcagtggttatctacttaggctgcacattggaatcacctgagagttaaaaaaccaggataacctctgcctgtgtctcatctccagcaattctgatgtaattggtcagggctgtggcccgagtaggtgagttctggttttttaaagctcccaggtgattctgatgtgcaatccaggttgagatcactttgggccctttccagctctttaaacatatatatttatctaggaaggtatgaaagcataagttttcttgagactgcctttaacatctgtaaaggctttcaaagcagcttctgtagttttttttaaatggctgaatatttttcaacaggcagcatttgggttataaaattagcttttggtagagttgacttataccacctccagcttttgttccaaaaataaatactggttcttttggcacactagttgttttaccctaaagttcctctttgtaagccagttattaaaagttgtgatgcagccagggcgaagtggtacacatctgtagtcccagctactcggaaggctgaggggggaggatcgctagagcccaagaagtcaaggctgcagtgaactgtgattacaccactgcactgcagcctgggccacagagcgagactcatctctttaaaaaaaagaatgttgtgaggccgggcgcagtggctcacgcctgtgatcccagcactttgggaggccgaggtggacggatcacctgaggttgggagttcgagaccagcctgaccaacatggagaaaccctgtctctactaaaaaaaatacaaaattagccgggcgtggtggcacatgcctgtagtcccagctactcggcaggctgaggcaggagaatcgcttgaacctgggaggcagaggttgtggtgagttgggcgagccattgcactccagcctgggcaacaagagcaaaactccatctcaaaaaaaagaaaagaaaagaaaagaatgttgtggccaggcgcggtggcttacgcctgtaatttcagcactttgggagaccgaggtgggcggatcacgaggtcaggagatcaagaccatcctggctaacacagtaaaaccccatctctactaaatacaaaaaaaaattagccgggagtgctggcgggtgcctgtagtcccagctactcaggaggctgaggcgggagaatggcgtgaacccaggaggcagagcttgcagtgagcggagatcgcgccactgcactccagcctgggcaacagagcgagattccgtctaaaaaaaaaaaaaaagaatgttgtgataaaaggtgatgctcacctctcccacacccttttatagtttagggattgtatttccaaggtttctagactgagagcccttttcatctttgctcattgacactctgtacccattaatcctccttattagctccccttcaatggacacatgggtagtcagggtgcaggtctcagaactgtccttcaggttccaggtgatcaaccaagtgccttgtctgtagtgtcaactcattgctgccccttcctagtaatccccataatttagctctccatttcatagtctttccttgggtgtgttaaaagtgaccatggtacactcagcacggatgaaatgaaacagtgtttagaaacgtcagtcttctcttttgtaatgccctgtagtctctctgtatgttatatgtcacattttgtaattaacagcttgctggtgaaaaggaccccacgaagtgttggatataagccagactgtaagtgaattactttttttgtcaatcatttaaccatctttaacctaaaagagttttatgtgaaatggcttataattgcttagagaatatttgtagagaggcacatttgccagtattagatttaaaagtgatgttttctttatctaaatgatgaattatgattctttttagttgttggatttgaaattccagacaagtttgttgtaggatatgcccttgactataatgaatacttcagggatttgaatgtaagtaattgcttctttttctcactcatttttcaaaacacgcataaaaatttaggaaagagaattgttttctccttccagcacctcataatttgaacagactgatggttcccattagtcacataaagctgtagtctagtacagacgtccttagaactggaacctggccaggctagggtgacacttcttgttggctgaaatagttgaacagctttaatatacaataattgttgcattattatttcagatgataaatgtggtcataagtaagaaataaatgatcgagtttagtcttttaattcactgtcctttgaatacctgcctcttactctggaggcagaagtcccatggatgtgtttatgaacatggttgaggaagatttaggaagactgcaacagtacactacctaaagcaggttttttactccatctttttttgccacgtacactggcctcccactttgatatgcttgaaattatctccttgatttgtctttcaaaactacatattgaggctggttgcggtggctcacacctgtaatcctagcactttgggaggccaagccggacagatcacttgaggtcaggagttcgagaccagcctggcaaacatgatgaaaccccacctttactaaaaatacaaaaattagccaggcgtagtggtgtgtgcctgtaacccagctacctgggaggctgaggcaggagaatcactggaacccgggaggcagaggctacagtgagccaacatcacgccactgcactccagcctgggtgacagagcaagactctgtctcaaaacaaaacaaaaaacaaaaaactacgtattaagacaagaaacagactgggcgcggtggctcacgcctgtaatcccagcactttgggaggctgaggcgggcggatcacaaggtcaggagatcgagaccatcctggctaacacggtgaaaccccgtctctactaaaaaatagaaaaaattagctggggtggtggcgggcgcctatagtctcagctactcgggaggctgaggcaggagaatggcgtgaacccgggaggcagagcttgcagtgagcagagatcgtgccactgcactccagtctgggtgacagagcaagactccgtctcaaaaaaaaaaacaaaaacaagaaacaaattaaactaatgtgatagactactgctttgttttcaaaagatacactccccaaaagttactgatctaaaatacagtagtactatctctgtttagtaagaaccctgacaactaatagtgttcttatatgtaaaatgctattcttgcctttcatttcagaatatactttttaaatgtgaatttctggatttttttttatagcatgtttgtgtcattagtgaaactggaaaagcaaaatacaaagcctaagatgagagttcaagttgagtttggaaacatctggagtcctattgacatcgccagtaaaattatcaatgttctagttctgtggccatctgcttagtagagctttttgcatgtatcttctaagaattttatctgttttgtactttagaaatgtcagttgctgcattcctaaactgtttatttgcactatgagcctatagactatcagttccctttgggcggattgttgtttaacttgtaaatgaaaaaattctcttaaaccacagcactattgagtgaaacattgaactcatatctgtaagaaataaagagaagatatattagttttttaattggtattttaatttttatatatgcaggaaagaatagaagtgattgaatattgttaattataccaccgtgtgttagaaaagtaagaagcagtcaattttcacatcaaagacagcatctaagaagttttgttctgtcctggaattattttagtagtgtttcagtaatgttgactgtattttccaacttgttcaaattattaccagtgaatctttgtcagcagttcccttttaaatgcaaatcaataaattcccaaaaatttaactgctttatgaattcaatttaaaaatccttaaaataagtcctgtctctttaaaaaaacctatgcatagttatcatttctctacaaattaacctagtttagttttctgttggttccattttccttgtttgttaagttttagtagctagtttaattgtaatctcaatgattatgtggtagaatgggttggcggagctacaaaaattcctagctacttcagagacattaaatttcagacacatggtacactttatattacattttactatgctaaaataacacggctttcttttggaattctgttcagtttttcagattgtaatctcagctacatctcaacagattgttctcagatatgtcctattaccttctttgtgtagatagtgctttattgactaagaacaatgacaacaacaccttttgttttctgggaataggagaaaagttttaagccaaaactcttaattgcttatctgctccacgtgaggtatgaactatcaaacttaggagccatctagcttacacgtgttccttaaaaagtttgctgtaggccgggcacagtggctcgtacctgtagtcccagcacttttgggagcccagggtgggggatcacttgagctcaggagttcaagaccagcctgggcaacatggcaaaacgccatctctacaaaaatacaaaaaaaaaaaaaaacgctgggtgtggtggcgcacaactgtagtcccagctacttgggaggctgaggtgggaggattgcttgagcttgggaggtgaaggctgcagtgagccttgacagtgccactacactccagcctggatgacagagtgagaccctgtctcaaaaaaaagagtttgctgtaattcccagcaacaaagtaggagactcaaactaaataattttctatagtcctagaacttcttagtttacaaaacatttttacttctgttatctcatttgatcttcatacccatgtaaggttgaggtagatgttaccacatgtgagtgcaatatccagaactcctgaatccccttcttcccctaaaatgtcagcccgctgaggtccacttggctaccctcttgaatactgcatccagcttcccactgctgaacctctttactctttttttttcagttgcacttaccaccttctagtaagttgaaccatatgaaattaccatttttgcaggtaaaaaatggccggtgataggcagtttggcgtcgtataacccaataacatgttatataatttacccacaagtggtgggttgctatgtcctggaggagtcagcttcagactctagctaaatgattgtataaccttgcagctctcccctaagtgaggaggcaatgttgaaagtcccatgtcttatcagaaccagggaggcagatgagaaactgccttatggcagctcccacaacatagggaggtgggtgacaaatggccttgggacagcttcttcccaagactggttatgttacagtgttcctgggaggatcacatggcattcctccaagatgggtcagactgctgttggccttgtctgtgtggcgtatgtgaagacattcatggcagagctgttcccttagaagcatctactaaattgatcttttcctttcttacttactgtctgtctcccttagtaggctgtcagctccgtgagtgcaggaccttgccagtcctggtcactgctatatccccagcacctacaagagtgcctggaaaattgtagtgctcaataaatatttgttggataaatgatagaatgataggaagttaaaaagcaattaaaatacttgaaaagaagcaaaacatttttcatgttaagcaaaaaaaaaaaaaaaacttattaaggatagctaacatgtattgaattctatatgcaatggaatgatacttagcgcctttgaatccttatgataaccctataaggtaggttgtttgggtttttttaattgtcccaactttacagatgaagaagtgcaggtccagagaggtcacataatttgcccaggatcacacagctagtaagtagcagatgaggaatttgaacccaggcagttgtattccaccatctgccctcttagttcattgccacttaacctataatgcccagctcttgtgtagaaattaatacactgataacatagaggaaaacattaagctcattgaatgtaataagtccagatgacttgtacattaaacacagctttttgaggtcacagctgatctctaagaatgtaaactgatttcctctggcactaaaaagcattttcaaagactgttaagagagtttctccaacattctcttcagatttttctgctggcttattttatgattctgtggacagcttcagacaaaataactttctggtatgaaggattgtgtttactctgcttttttttttgttgttttttgggttttttgttttgttttgttttgtttttgagacagtgccttgctctgctgctgcccaggctgagtgcaatggcatgatctcggctcactgcaacctctgcctccctgggctcaggccaggtgtatgctaccactctcagctaatttttaatttatttttttagagatacggtcccactctgtttcccaggctggtctcagaactcctgggctcagacagtcccccgccatggcctcccacagtgctgggattacaggcatcagccaccatgctcagcttgttctgccattttcaaatgtgaattttatagacactttaaaccacttgaaagagtgatgatgttttaatgattttcattattatttgcaacttcaagcattaaacactgccaaattaagtttcaagttttctctttacacaatatggatgtacttcataatggacttcctcatcatgattaatgagtgaagtgacattcaaacttggtagcttttcagtagaacttcctttcccaacattttttctgttcctttaattatggcaatatctgagagctctgaacataagtcaaaggtttgattatttttcatgtggcttcctctgcttggaactttctgccccgcatcttcccgttgccccctgtgtcctcttgtcatgcccctacccttttttgagtgtgtctattttctggcactacaagacataacaggctcatcttgtgttttccctaccctgacccagaatcagccattacttcaaggagccctggttccattattggagaatactattagaaaccaggatctggtgctaggcatgctcatttctattggagtgtcatacaaacaatttgtaaattgtttgtaggtcctcccagtggataggattaggaaataaaacatgcatactaaccatgcatacacacacatctacgtctatttctgtatctgtctgtatacatattaaaataaacatgggttgataactaatgtttctgctgtaatccacagccttcatcctagcctgccactcttcttctttttagctttttcaacagtgggaaatgtggctcttgttatgtacactttattcacttatttgtttgaccctagtatcataaagtagttccgtatgcctgtaacagatcgactaactagagtccattatttgcggaaagatctttttgtccgaagcgttaccgcaggggtgtccaatcttttggcttccctgggccacactagaaaaagaagaattgtcttgggccacacgtaaaatacactaacactaacgatagctgataagctaaaaaaaaaaaatcaaaaaaatttcatgatgttttaagaaagtttactaatttgtgttgggccacgtttaaagccatcccgggtcgcaggttggacaagcttgccttacagtatccagtcaaaataatgttttccaaaattacttcttttctttttcatccctttcagtgtggccgttatttataatgcagtttggttcattagtgtttttattacaaatacaccctcagccttcatatcctagttttaatgaattattacggtgaaacataataagagtcagagctatacagaaaggtctactcagaggtgctttgttccctcctattctgttcccactactcctactttccactgaccctgtaagcatcatatttatttttaatggcagttacatttttaccaagtgcttactatctgtaggcacttggtgtgtattgcttcttttggtgttcacagcaacctcttgaggtaagcactattattatcccccctttttcttttttctttctttctttcttttttttttttttttttttgacagtcttactctgttgcccaggcaggagtgcagtggcgcaatctcggctcactgcaacctctgcctcccaggttcaagtgattctcctgcctcagcctcctgagtagctgcgagtacaggcacaagccaccacgcccggctaatttttgtatttttagtagggatgaggttttgccatgttggccagggtggtctcgaactcctgacctcaggtgatctgcccgcctcgacctcccaaagtgctgggattacaggcacgaaccactgcacccggctattatccccattttttagatgagaaagctgaatcccagagagcataagaagcttgtccagagtgacatctctgatgcataaccagtactcaaacctatttttctgacaccaaggcctgtgtgtaaactgtaaaggggctgcttggcacctactttcctaaagttgtcctatcccttctctgtctgggtcttcctgaagcttggcacttctgaagtcacctctctgaaaacattctggtaactgttaaatcccttgttctagctattcatgtgttctgtgtggttaaacaaggttcacaatgggccacctggcctttggaacttgggtgaagaggctgccttcagttgatcctccccactcccattttcaaaacatgggtttacatgagttatttgtgaattaggaaacataaccatgttttgagccttcatagaaaacaaacgtctggggtcatacaggttaaaaggagtaaccaaattcggcactatcattgttctattcagtagacaattctggggcctttctgtgtctcaggttctgtactagttgtttcaggactttgggataaatacaaactatccctgccctcagggggcttaaggtcaggtgtacaagtgactctaatgtgaggcaaggctggattcagtgctgcatatctaatgctatgggaattcaaagaggaagtgatcagaatgagaagggagggatggatcattccaggagaagcttcagggaaaagcaacatttaaaatgagacttttgagagtgagggaaatttggacaggtggatatagaggatgcaaggctagaggaaaggttttagccagaaagtctgcttgggcaaatgcctgggtaaaaaaagaaaatccactttgggaggacaaggcgggcaatcgcctgaggtcaggagttcgagaccagcctggccaacatggtgaaaccccgtctctactaaaaatacaaaaattagctgggcgtggtggtgggtgcctgtaatcccagctacttggaaggctgaggcaggagaatcacttgaacccaggaggcagaggtttcagtgagccgagattgcgccactgcactccagcctgggcaacaagagtgaaacatctaaaaaaaaaaaaaagaaaatcacagggcagtgtggggaatggtgagtattctaatttggttgtggcagagaggatgtagaaggaagtgataagagagaaagccggataggagggcctttgtgccagttaggatgttctagacttccagccaggttgcccagctcaaactggcttaaacaatgagggggtttattggctatgtaattgggaagtgcagaggtagctcaggccagatcagtttgatccactgctccattatgatgtcaaagacccatgcgatttccacctcattattctgctgtccatagagccaacttcatcctaaggccagtccttgtggtcagacaagggctgccaatagtaatctgggtgcaagtttctttgagaaaatctttctgtgtcaactctcttaaaaggggtgaaaaatctctccttaagtcccactggccagaatgggcccatgcacccatttcttaaccagtcactggcaactgggggtgggattgccgtttgcccaatcaggtccatttctggagctaagattaaactccatttcccttgggacacattgaacagaatcagaattcgatgaagaaggaagaagcggagaattggtttggtgttgggtaggcaaccaaaaataacctctgttgcctcaagtgccaagaaagtggtgttttgtgcttgttagggtaaaaatggggatcatggaaaatattttaagtttcatagaccaaaaaatattccagtgtttcatcaaatctaagaggctatcaattataagatataccattattttatgtaccaccaaggaagaaaaaatgctgccagtgaagttaggatgtattgcaggttgggttctctgggaagcaggctgaaaaggaggtgagaatgcaggacatttatgggagaacacccttgggattaatactggaggaggagaaccaagcagggttggtggggcacagggagaagttgggatgccatgcagtcacaacaaaggcctcagccaaccccacggggagctcgagaagctgagatggcccttcagtgttgccctgccttgtggtgagtgaattgggtcttcatatccccatgttgactggtcattggatgtgggctcccttaggaatgggcatctcttcagcagaggtagctttcttcaaaagaggtgattccaaagagtcacccactcactgagggctgtctgctggcagcattctcagccactactcaaagatgacctgtccaggaaggggaacctaggtggcatgacacattgtctattacaacatgctactgattataagagccgggaggtggggggcaacacaatgtctgagatattaaaatggaagtctcttagaagaaatggataattctataattatagttaatcagaaaggggaagaagtggggaaatggaccaagggcctgagagagaaaacagacgcaacaggccactagaaagataggacactggagggtgggaagccctagcagtttcttccagggtgggctgggcacggtggctcattcctgtaatcccagaactttgggaggccgaggcgggcagatcatttgaagtcaggagttggagaccagcctggccaactcctgtttcaccctgtctctgccaaaaatataaaaaattagccgggtgtggttgcatgcgcctgtaatcccagctacttgggaagctgaggcaggagaatcgcttgaacccaggaggcagaggttgcagcgaggaaaaatcgtgccactgcacttgagcctgggtgacagagtgagactgtctcaaaaaaaaaaaaagtttcttccagggtggcttctgtgccagagtcaggtgccccagctacctctaatttatggtcctcctgcactgggaaacagattttctacttttggtttcatgataaataacatttccccctgattttaaaagttatggatttggctgggcatggtggctcatgcctgtaatcctagcactttgggaggtcaaggcaggcagatcacttaaggtcaggagttccagaccagactgggcaacatggtgaaaacccgtgtctaccaaaaaaaaaaaaaaaaaaaaaattagccaagtgtggtggtacatgccagtagccctagctactcaggagactgaggtgggaggattacctgagcccaggagatcaggcctgcagtgagctgtgattgtgccattttactccagcctgggtgacagagtaagaccctgtctcaaaaataatagtaataggctgggcgcggtggctcaagcctgtaatcccaacactttgggaggccaaggcgggcgatcaattgaggtcaggaactcaagaacagccttgccaaaatggtgaaactccgtctctactaaaaatacaaaaatgagccgggtgtggtggcgcatgcctgcattcccagctactcaggaggctgaggcaggagaatcgcttgaactcgggaggcagaggttgcagtgagccgagattgcaccactgcactccagcctgggtgacagagtgagactccatcttaataataataaaataataaaaattttaaaaagttatggatctggatggagggaaatggaatgtataaaagaagtaaacatacacaagaagatacaaatacagaataaaagtaaaatgcaaccatcatcccactaccccgataccagggtatccgtttttacatcttttctttcattctttctgtctttatataattgtataaatgctgcataaacctcctcttgcctgctgcctcctcaaagacctccctccctccttcactgcccttctgctcctggagagccaccctctctccatttatccttcctatcagcttcaggttcttaccatgttaacaaaaagaaaatcttataagcctgtcactctctacatacgccgcacctcctttcattcatagcctttaaaacatatatatagcagttattgtggttatttttctgttcacaaaataaaaaaacactctttctagaaaactggaatatagaggcaagctttttttttttttcagacggagtttcgttctgtcgcccaggctggagtgcagtaacgaaattacagcttactgtaacctctgcctcctgggttcaagatattctcttgcctcagcctcctgagtagctgggattataggtgcctgccaccacacccggctaatttttgtatttttagtggaaatggggtttcgccatgttggtcaggctggtctcgaactcctgaccttgtgatctgcccatctcggccttccaaagtgctgggattacaggtgtgagccactgcaccctgccgaggcaagatttttttttttttttttaagaaaacccagttattccattacccaatgaaactctaaacatgttgatgtacatccttccaaaatttctttttatgacaacatgctttttatttttaattatttttattttattttaaggtccggggtacatgtgaaggatgtgcaggtttgttacataggtaaacgtgtgccttggtggtttgctgcacctgtcaacccatcacctacgtattaagccccacatgcattagctattgatcctgatgctctctctccctgctggctccccagcaggccccggtgtgtgttgttcccctccctgtttatgagaacactttcttgacataaagatttcatttattcccatggaattctaaaggcttttcatacttgtgaaggaataatagtttagaaataaactgaactttaaaagataccattttgaaaaataatatacagccatcaaaaattatatttatgggaactatgcaataatattaaactctatcatctgttgactgcctcctatattccagaaactttacatacaccaattctaatccttacaagaacgctgtgtaggctttagcattagatggaccaggtttcaccaactgtatggtcttggataagtacccaacctcctgtccctaagtttcctcacctgtgaaaacacggtttctaccagctttcaaataagatgatcaatataaggcacttggaacagaacctgacacatcataagcactctataaatgtctattatcaccaaataattccaggtgccttgaaaatttaaatgaaaaacaaaatcaaaccatgacaatactagaagcaaatttaggtgaacacttttctaatccgggggtgggcgggggctggggggaggcagggagaagaccttttttttttctttttgagatggagtcttgctctgtccccaagctggagtgcagaggcgtgatctcagctcactgcaacctctgcctcctggattcaagtgattctcctgcctcagcctcccgagtagctgggactatacaggtgcacaccaccacggccagctaatttttgtatttttagtagagatggggtttacaccctgttagccaggatggtctcaatttcttgacctcgtgatcccatccgcgttggccttccaaagtgctgggattaccagcatgagccaccgtgcccggctgggagaagacctttctaagcatgataccaaaggcagagacaataaaggcaaagaattgacagaattcactatccgataaaaatcacttctgtggccgggcgcggtggctcacacctgtaatcccagcactgggaagccgaggtgggcggattgcttgaggccaggagttcaagaccagcctggccaacatggcaaacctcctgtctctactaaaaatacaaaaaattagctaggcatggtggcatgcctgtagtcccagctactcaggaagctgaggcatgagaatcacttgaacctgggaggtagaggttgcagtgagccaagatcatgccactgcactccaacctgggtgacaaagtgagactctgtctcaaaaaaaataacaattaaaataaaatcacttctgaatggtggaaagcaccacaaagttagaggtcaagcaataatttggagaaaagaattagtaatttgttggacagacaaaagacttttttaatataacaaaaactttaaaaattaaaaaaatacacattcgaggacattttcctaaaaacacaggcaaaggacataaacagcaaagcaagaagacagcttgatgtggccattttatccagggggacattttggtgagccctatggacacagctgccatgatgccaacaatgtgacagctgtccccttcaaaatgcgttagccccagctcttcctctcccccaacctccagtccaaaggacttgcactttctactttactcctttctgcattgtttaattttcttttacaaatatgttacttgtcatcagaaaaaataaagaaataaataaactgttagagtgttagccccttaaaggggagcaagaatcacctttctaaaagaaagtttatgttaaatataatattagcatatgtgaatcctgagagaaaagttaacagtttagttgagttatttcctctgtagtctggagctaaaaatagggaatcttattctgtcctaaatcttttccttcctccacccagtgtctgtctggatcgaattcattcattcactcagtaggcactcactcagccaggcatggtgctaggcctcaggacctcgctgtgaaccagaaactgtccctacccccatggtgcaggcattctgcttgggagttggaggaggaacaggtaaaaaataattaaatattcaggttaacgatatattgtcaggtttgaggattgaggaaagggcgcagagagtggcaagggctgctgttttagatacagtggccaggaggcctccgatgaggtgacctttgaggagagacatgcaggagatgaggggacagtgaagaggatttctaagaacactccaggcagacagaacagcgacagccaaggccctgaagtgggtaggggcctggtgtgtgtgaggaacctcaggattgccatcatggctggagcagagacatgaagcaagaaggccatggagatgagggcagggagatcccggagtggggagatcagatggggctctgtgtatcatgcaaaggactttgcattctgttccaagagctgggaaggttgacataattaggaaaaaagcccagaaaagcagaggtatccatttttcatggtaaagatgataatttcaattaaaacacgattcctggatatatgtaatttgtaggccaaatggtgcccaatccctacctccctcaccccctcacttccctatccctaaaacctgtacctcaactcccgttcgtaagtgatgggagttaggaatagagaaatctcccggttgggttttctgagcaaagaggtaacatagcagctctgttatttctttcacgtctccaagggaaccatgactcacccttagctatcccccgggaatgtggccctcagagtgttcttttactgattcgtgattttgttatgtacacctggagtgatggaacataccataccagcttgtcagggttgctttgtgcaaagatcgatgacgtgtgtgaacccggatccatgcttggggtcctgagtttcaggtgccatggccagttgctagcaggttgtatgtgtgtgaccagcccctatgtgagtctctcagaccctgaaactccaaacaggcttccctgggcagagacattctgtccatgctctgtggcttgctgctcgagagggatagatcacatcctgtgtggcttcttcttaaatgaagaaggacattggaagcctgtgctgggcttctctggaccccccgatgtatatgtatgtatattaaagagagaccagggtctcactctgttggccaggctggtcttgaactgctagcctcaagaaatcctcccgctttggcctcccaaagtgctgggattacaggcatgagtcaccatgcctgatgtatatatttttccagctcccttcttttctgtatcatttgctattactacctcttagctattagtataaactgatcttgagttgtgtaaatctttctggtgattcactgtgatgggatgattgtgtcctctcaaaattcctatgttggagtcctgacccatggtacctcagaaagtgactgtatttgaagataggtctttaaagaggtcattgtaaattaattaataaggtcattagggtggactctaatccgatatgactggtatccttataagaaaaggaaattagcacacagacacacaatcagagggagaagacagccagtcatctacaagccgaggagacagacctcagaagaaaccaaccctgcctgcaccttgatcttggacttctagtcgccagaactgtgagaaaacaaatctcatgtttaagccagaacctagcacgtggtacttgttaaggcatccctagaaaactaatacactcactgaatgaggcaggtagctgtttcttttattttttgagacagagtctcactttgtctccaaggccagagtgcagtggagcgatcacagctcactgcagcccctgccttccaggctcaagccatcctcccacctcagcttctcaagtagctgggactacaggcatgcaccaccacgcccagctaatttttgtattttttttttttttttgtagagacggggttcaccgtgttgcctaggctggtctcaaacccctgagctcaagcaatctgccctccttggcctcccaaagtgttggatttacaggcgtgagccactgtgcctggatatggtaactttttcatatgctatttgcttgatgattatttttctgtttctgatataatgctttttattagagagttatctgtttgtttttattttttaatgtttgaatttaaaaaattagtataatttgcataattgaaaaattatatttgaataattgaaatatatttgtataaccttaaatttaaaaactatgatagcgtatacagtgaaattttcctctcatcccttttttccatttaaccagtgcacttcccaacagccaacagataattttagtttcctcactccctgagctattttatgtatatgcaagtagatatgtacatacatatttctgccttgtaacacaaatagtagcatactatacaactgctctgcttcttcctttttttagctaagaatattaaaagagtgaaaaagatgtacgctaacaaaaatcaaaagaaaactagagtgacattataagaactgatgatgtagatttcagagcaatgattactgctaggaaaaaagggtcattttacattgatcaaagaggtcaactcatcaggaagacataataatcctaaacacttatgtacttaacagagcatcaaaatacatgaagcataaatgaaagaaccgtgggagaaagtagacaaattaatgactgtagttgaagatttcagtatccctctatgaaaatcagggtagtacaagtacacagaaaattggtaaagatatatgacttgaacaacattatcaaccaaattgacctcatttacatttgtggaatgttccaactaagaacgtcagaaaacatactcttttcaagtgcacatggaacatttaccaagatagacaatattttgggtcaccgcaagtctcaacacattgaaaggattcagatcatataaagtatgctccatgaccatgatggaattgaattagaaaccaataatgtatctctggaaaatacacaaatatttggaaattaatatgccttctaaaaaatttatgcatcaagaagaaatcaaaagggatatttgaaagtactatgaactgatggccaggcatggtggctcacgcctgtaatcccagcactttgggaggccgagaaagatggatgaagtcaggagttcaagaccagcctgggcaacatggcagaaccccgtctctactaaaaatacaaaaaattagccgggcgtggtggtgggcgcctgtaatcccagctactcaggaggctgaggcatgagaatcgcttgaagctgggaggtggaggttgcagtgagccaagatcacgccactgcactccagcctgggcaacaagagtgaaactcggacaaagaaagaaagaaaagaaagagagagagaaggaaggaaggaaggaaggaaggaaggaaggagggagggagggaaggagggaaggaaggaaggaaggaaagaaggaaggagggagggagggaaacaaaaaagaaaaagaaagagaaaaagggaggaaagaaagaaaagaaagaaagaaaaagaaagaaagaaaagaaagaaactaactcaccatttagtaaccatagtagtaataactgatttgggcaagagtcatcaatgggtgaaagcttgatgaggaataggatacttatatacccccaaacaaagccacaaattattaataacaaaggggaaagtagtaattttacaatggcaagacaccactgtaaacggataatgaaagaacatcaacaataatgggaaaaaaatgatgcaatttacctcctgctatgctgctctgagaacaagcataatttctgtggtagtcctccaaaaatgcataacctgagtctgttcgtggggaggcatcagataaacccaaattgagggacattgtacaaaacaactggcctatatgcatcaaaaatgccaatgtcacaaagtctggggaactctccccagttcaggagacaattaaatgtaatgtgtgatcctggactgtgaaaaaagtaactataaaggatggtattgaaacagttgtcaagattggagtatagtagtaacaaatcaaggctaaattttcttattgtactgtcgtgtgtaaaagaatgtctttgttagaaaatacacactgaaatatccacaggtgaaggagaacaatagctccaatttacaaatgcttctgaaaaaatatatatatacacacacacatacagagagaaggcaagtgataaagcaagtggggcaagtttttttaaactggtgaatctgggtaaaggatattcaggaattctttgtactattgttgcaacatttctgtaagtttgaaatttaaagtttaaaaagaaagagaggccggactcagtggctcacgcctgtaatgccagcactttgggaggccgaggcgggcggatcacgaggtcaggagatcgagaccatcctggctaacacggtgaaaccccgtctgtactaaaaatacaaaaaattagccgggcgtggtggcgggcgcctgtagtctcagctactcgggaggctgaggcaggagaatggtgtgaacccgggaggcggagcttgcggtgagccgagatcgtgtcactgcactccagcctgggcgacagagcgagactccatctcaaaaaaaaaaaaaaaaggagagagaaggcataaacaatattaaaaataaaacagaacattactatagacgtagtagagattttaacgatcatgaagaaaatactagaaataagtctttatgttttattttattttattttatttattattattattttttgagatggagtctcattctgtagcccaggatggagtgcaacggcgcgatctctgctcactacaacctccgcctcccaggctcaagctattctcctgcctcagcctcccaagtagctgggattacagaaaagcgccaccacgcccaactaatttttgtatttttagtagagatggggtttcaccatgttggccaggcttatcttgaactcctgacttcaggtgatccacctgccttggcctcccaaagtgctgggattacaggcgtaagacaccgcgccaagccctttatcttttagatgtatatactgagatacttatcataaaatggtgggatatctgggatttccttgaagataatccagggcgccaggtatggtggctcacacctgtaatcccagcactttgggaggccaaggccggaggatcacttcagctcaggagttcaagatcagcctgggcaacatggggaaaccctgtctctattaaaaatacaaaaagtagctaggtgcggcggtagcacatgcctgtagttccagctacttgggaggctgagttgggaggatcacttaagcctaggaggtagagatcagcttcagcaacatggcaaaaccccatctctacaaaatatacaaaaattagctggacttggtggtgcacacctatagtcctagctacttgggaggctgaggtgggaggattacttgagcccaggaggtagaggtttcagtgaaccgagatcgtgtgactgcactccatcctggatgacagagtgagaccctgtctcaaaaaaaaaaacaaaactgcactcttttatgtatttttatacttttgaaatgttctataatatttttgaaatgttctataataagagaatattgtgaagactttatagaaatacatttgagaacctaaatagagtaaattactagaatcaaactaaggaaaaaatggaaaatctgaaaaaaatgcaataatcattaaagagattgaattgtcatttgaaagtctgtcctcacaaaagacctccttcctctactgtggtcagcatctttggcatacatgagataaaatgtatggtccagtccagcctctaagcctgtgcaattcattcagtcattcagcaaatatctattgaatactacgtatgggccaggcactcttctggctaccggggatacataagtgaacaacaacaacaacaacaacaacaaaggaaaaatgtctctaattttgtggcacttaatatacaacaaataataatgaataagtgatatatagtatgttaggaggagaacattactatggaaaaatagaggaggataaaggagactgagaggcagaaggatgggccagtttgtaatttgaaaggcaaggttgtaggcaaggttcagattggaacactgaaacacggatttcccacagaaatgaacaggtctccttggagagatggctaattcaaggtctgggtcaagaagtgtacaggaagagcctggaacattttgttgcaccaaaaagataaaacagaacaaaacaaaactcggttaattagttactgttggaagatgctagcaagccagttctttagtgatttttaaaagacagataattataaggaaactttttaataaacaagcatttatactgttttcgacacagactaccactgactactcaaataatacatgaggggatatttctttttatggaagtattctggctaataagaagaatagaattaatcaccagtggctgccagcaccacaaaaagagatacaactagatcttatgtgttttacaatttttttatatttggggggctggtctcttatatgtctcttttggagaaacagcccaccacctggattcatctcctagggcttccataacaaagtaccataaaatgagtgtcttaaaacaacacatggccgggcacagtggctcatgcctataatcccagcactttgggaggccgaggcgggcagatcacttgaggttaggagtttgagaccagcctggccaacaaggtgaaaccccgtgtctactaaaaatacaaaaattagccagacatggtggcgggcacctgtaatcccagctactcaggaggctgaggcaggagaatcgcttgaacctgggaggctgaggttgcagtgaggtgagatctcgccattgcactccagccttggcaacagagcgagactccatctcaaaaacaaacaaacaacaacaacaacaaaacactcacgtttattctctcaaagttctggaggctaaaactctgaaatcaaggtgtcaatagagctgtgctccctccaaaggctttaggggaggatccttccttgcttcctcctagattctggtggtttctggcaagctttgatattctttggcttatgactgcataattacaacctctacctccatattcatgtggccatcttccctctatgggtgtctgtgtccaaatttccctcttatggacaccagtcatattggattaggcttcccctaatccagtatgacctcatcttaacttgattacatctacaaaggccctatttccaaataaggtcacattcacagattccaggtagacatgaaatttgggtaacactatttaacccagtataccacctatgaagtattctttttatttttctcctcagcttttattttaagttctggggtacatgtttaggacgtgcagtttgttacataagtaaacgtgccatggtggtttgctgcacagatcaacccatcacctaggtattaagcccagcatccattagctatttttttctgatgctctcccaccacccgccccgcccccgacaggccccagtgtgtgttgttcccctccctgtgtccatgtgttctcattgttcagctcccacctataagtgagaacatgcagtgtttggttttctgttcctgcatttgtttgctgaggataacagcttccagctccatccatgtccctgcaaaggacatgatcttcttcttcttttttatggctgcatagtattctgaagtattcttgacaaaaagaaaaaatcaacctgaatctattcaagcctctagagtcaactaaaaatttacagaaaatacaggagactgagtaacgtgttaaatgacatcacagggatgcaattagccaactccagactatgggaaactctacaggacaaactacctggtatcttcaacaaataaattgcagggaataaagacatgatggaggaacctagactaaaagagacttaaagatgaaccagtagctatgtttggacctcatttggatcccaattcaaacaaactttaaaatacacacccatttatgacacttatgagacaattggagatttgaacactgacttgaatatccattgatattaaggaattatttttgaaaatgcggaataatactaaggctatggttttttttagagagtccttatcttttagaaacatatactaaatttgcagataaaaatgacttgatgttggggatttgtttcaaaataatatgggagttgggggatgtgggtgcagatatggctgtgacaagatggttcatgggctgataattgttgaagctgggtgatgggtacatgtgggagttcatgatactatatttttatgtgtttcaatctttccataataaaatttttttttagaaaaaagaaagaaaggaaagaaggaaagaaagaaaagaaagaaagaaagaaaaagaaaagaaagaaagaaagaaagaaaaagaaaaagaaagaaagaaagaaagaaagaaagaaagaaagaaagaaagaaagaaagaaaaaatacggtatcaggataagcctaaataagaaggtgacatttgctgtggatcgttcagcatgtacagggcccctgtcaccatctggctttaaaaatactaaaaaataaatcttgtgtaggggctgtgagagattaaagacggccacaaattctttttttaacccaattctcccataccatttattttaaaatttatgcatttttattaattaatttatttatgtatttagttttagagacagggtctcgctatgttgcccagactggccttgaactactgggctcaagtgatcctgcctcagccttctgagtagctgtaactacaggtgcccaccactgtgactagcctctgccacaaatgcttttctaattctccccttacctaaagctaattcccctccctttgaatttggcctggccttagagactggcttgaccaatagatggcagcagaagtgaagttccagggcttctgaggctaagtcataagaag

SEQ ID NO: 27 - DNA, 20 bp, Homo sapiens
  source 1..20: mol_type = genomic DNA
gaatgatatgtctctcccga

SEQ ID NO: 28 - DNA, 20 bp, Homo sapiens
  source 1..20: mol_type = genomic DNA
caagcaaccaaaggcagctc

SEQ ID NO: 29 - DNA, 20 bp, Homo sapiens
  source 1..20: mol_type = genomic DNA
ccccacccaaatctcatctt

SEQ ID NO: 30 - DNA, 20 bp, Homo sapiens
  source 1..20: mol_type = genomic DNA
cgaggcgggcagatcacgag

SEQ ID NO: 31 - DNA, 20 bp, Homo sapiens
  source 1..20: mol_type = genomic DNA
ctacttatatccttttgaaa

SEQ ID NO: 32 - DNA, 20 bp, Homo sapiens
  source 1..20: mol_type = genomic DNA
ggtatgtttcatccactggc

SEQ ID NO: 33 - DNA, 20 bp, Homo sapiens
  source 1..20: mol_type = genomic DNA
cctcagcctcccgagtagct

SEQ ID NO: 34 - DNA, 20 bp, Homo sapiens
  source 1..20: mol_type = genomic DNA
tttaagaaggagagcaagtg

SEQ ID NO: 35 - DNA, 20 bp, Homo sapiens
  source 1..20: mol_type = genomic DNA
cttacaaaattcaagggcca

SEQ ID NO: 36 - DNA, 20 bp, Homo sapiens
  source 1..20: mol_type = genomic DNA
aagttcaattttcgctaagt

SEQ ID NO: 37 - DNA, 20 bp, Homo sapiens
  source 1..20: mol_type = genomic DNA
aaaatgtctctggacactga

SEQ ID NO: 38 - DNA, 20 bp, Homo sapiens
  source 1..20: mol_type = genomic DNA
agagagagagagagagagag

SEQ ID NO: 39 - DNA, 20 bp, Homo sapiens
  source 1..20: mol_type = genomic DNA
gcctaggcaaaaaaaaaaaa

SEQ ID NO: 40 - DNA, 20 bp, Homo sapiens
  source 1..20: mol_type = genomic DNA
tatcattatcttattttttc

SEQ ID NO: 41 - DNA, 20 bp, Homo sapiens
  source 1..20: mol_type = genomic DNA
tttttatgcaaagaatatga

SEQ ID NO: 42 - DNA, 20 bp, Homo sapiens
  source 1..20: mol_type = genomic DNA
agtctaaaagcttactttaa

SEQ ID NO: 43 - DNA, 20 bp, Homo sapiens
  source 1..20: mol_type = genomic DNA
tggcaattcgttacagcatc

SEQ ID NO: 44 - DNA, 20 bp, Homo sapiens
  source 1..20: mol_type = genomic DNA
tgatgatgtttgcacaaccc

SEQ ID NO: 45 - protein, 1152 aa, Homo sapiens
MALRVLLLTALTLCHGFNLDTENAMTFQENARGFGQSVVQLQGSRVVVGAPQEIVAANQRGSLYQCDYSTGSCEPIRLQVPVEAVNMSLGLSLAATTSPPQLLACGPTVHQTCSENTYVKGLCFLFGSNLRQQPQKFPEALRGCPQEDSDIAFLIDGSGSIIPHDFRRMKEFVSTVMEQLKKSKTLFSLMQYSEEFRIHFTFKEFQNNPNPRSLVKPITQLLGRTHTATGIRKVVRELFNITNGARKNAFKILVVITDGEKFGDPLGYEDVIPEADREGVIRYVIGVGDAFRSEKSRQELNTIASKPPRDHVFQVNNFEALKTIQNQLREKIFAIEGTQTGSSSSFEHEMSQEGFSAAITSNGPLLSTVGSYDWAGGVFLYTSKEKSTFINMTRVDSDMNDAYLGYAAAIILRNRVQSLVLGAPRYQHIGLVAMFRQNTGMWESNANVKGTQIGAYFGASLCSVDVDSNGSTDLVLIGAPHYYEQTRGGQVSVCPLPRGRARWQCDAVLYGEQGQPWGRFGAALTVLGDVNGDKLTDVAIGAPGEEDNRGAVYLFHGTSGSGISPSHSQRIAGSKLSPRLQYFGQSLSGGQDLTMDGLVDLTVGAQGHVLLLRSQPVLRVKAIMEFNPREVARNVFECNDQVVKGKEAGEVRVCLHVQKSTRDRLREGQIQSVVTYDLALDSGRPHSRAVFNETKNSTRRQTQVLGLTQTCETLKLQLPNCIEDPVSPIVLRLNFSLVGTPLSAFGNLRPVLAEDAQRLFTALFPFEKNCGNDNICQDDLSITFSFMSLDCLVVGGPREFNVTVTVRNDGEDSYRTQVTFFFPLDLSYRKVSTLQNQRSQRSWRLACESASSTEVSGALKSTSCSINHPIFPENSEVTFNITFDVDSKASLGNKLLLKANVTSENNMPRTNKTEFQLELPVKYAVYMVVTSHGVSTKYLNFTASENTSRVMQHQYQVSNLGQRSLPISLVFLVPVRLNQTVIWDRPQVTFSENLSSTCHTKERLPSHSDFLAELRKAPVVNCSIAVCQRIQCDIPFFGIQEEFNATLKGNLSFDWYIKTSHNHLLIVSTAEILFNDSVFTLLPGQGAFVRSQTETKVEPFEVPNPLPLIVGSSVGGLLLLALITAALYKLGFFKRQYKDMMSEGGPPGAEPQ

SEQ ID NO: 46 - protein, 1163 aa, Homo sapiens
MTRTRAALLLFTALATSLGFNLDTEELTAFRVDSAGFGDSVVQYANSWVVVGAPQKITAANQTGGLYQCGYSTGACEPIGLQVPPEAVNMSLGLSLASTTSPSQLLACGPTVHHECGRNMYLTGLCFLLGPTQLTQRLPVSRQECPRQEQDIVFLIDGSGSISSRNFATMMNFVRAVISQFQRPSTQFSLMQFSNKFQTHFTFEEFRRSSNPLSLLASVHQLQGFTYTATAIQNVVHRLFHASYGARRDAAKILIVITDGKKEGDSLDYKDVIPMADAAGIIRYAIGVGLAFQNRNSWKELNDIASKPSQEHIFKVEDFDALKDIQNQLKEKIFAIEGTETTSSSSFELEMAQEGFSAVFTPDGPVLGAVGSFTWSGGAFLYPPNMSPTFINMSQENVDMRDSYLGYSTELALWKGVQSLVLGAPRYQHTGKAVIFTQVSRQWRMKAEVTGTQIGSYFGASLCSVDVDSDGSTDLVLIGAPHYYEQTRGGQVSVCPLPRGWRRWWCDAVLYGEQGHPWGRFGAALTVLGDVNGDKLTDVVIGAPGEEENRGAVYLFHGVLGPSISPSHSQRIAGSQLSSRLQYFGQALSGGQDLTQDGLVDLAVGARGQVLLLRTRPVLWVGVSMQFIPAEIPRSAFECREQVVSEQTLVQSNICLYIDKRSKNLLGSRDLQSSVTLDLALDPGRLSPRATFQETKNRSLSRVRVLGLKAHCENFNLLLPSCVEDSVTPITLRLNFTLVGKPLLAFRNLRPMLAADAQRYFTASLPFEKNCGADHICQDNLGISFSFPGLKSLLVGSNLELNAEVMVWNDGEDSYGTTITFSHPAGLSYRYVAEGQKQGQLRSLHLTCDSAPVGSQGTWSTSCRINHLIFRGGAQITFLATFDVSPKAVLGDRLLLTANVSSENNTPRTSKTTFQLELPVKYAVYTVVSSHEQFTKYLNFSESEEKESHVAMHRYQVNNLGQRDLPVSINFWVPVELNQEAVWMDVEVSHPQNPSLRCSSEKIAPPASDFLAHIQKNPVLDCSIAGCLRFRCDVPSFSVQEELDFTLKGNLSFGWVRQILQKKVSVVSVAEITFDTSVYSQLPGQEAFMRAQTTTVLEKYKVHNPTPLIVGSSIGGLLLLALITAVLYKVGFFKRQYKEMMEEANGQIAPENGTQTPSPPSEK

SEQ ID NO: 47 - protein, 375 aa, Homo sapiens
MERASCLLLLLLPLVHVSATTPEPCELDDEDFRCVCNFSEPQPDWSEAFQCVSAVEVEIHAGGLNLEPFLKRVDADADPRQYADTVKALRVRRLTVGAAQVPAQLLVGALRVLAYSRLKELTLEDLKITGTMPPLPLEATGLALSSLRLRNVSWATGRSWLAELQQWLKPGLKVLSIAQAHSPAFSCEQVRAFPALTSLDLSDNPGLGERGLMAALCPHKFPAIQNLALRNTGMETPTGVCAALAAAGVQPHSLDLSHNSLRATVNPSAPRCMWSSALNSLNLSFAGLEQVPKGLPAKLRVLDLSCNRLNRAPQPDELPEVDNLTLDGNPFLVPGTALPHEGSMNSGVVPACARSTLSVGVSGTLVLLQGARGFA

SEQ ID NO: 48 - protein, 254 aa, Homo sapiens
MWQLLLPTALLLLVSAGMRTEDLPKAVVFLEPQWYRVLEKDSVTLKCQGAYSPEDNSTQWFHNESLISSQASSYFIDAATVDDSGEYRCQTNLSTLSDPVQLEVHIGWLLLQAPRWVFKEEDPIHLRCHSWKNTALHKVTYLQNGKGRKYFHHNSDFYIPKATLKDSGSYFCRGLFGSKNVSSETVNITITQGLAVSTISSFFPPGYQVSFCLVMVLLFAVDTGLYFSVKTNIRSSTRDWKDHKFKWRKDPQDK

SEQ ID NO: 49 - protein, 510 aa, Homo sapiens
MEDTKESNVKTFCSKNILAILGFSSIIAVIALLAVGLTQNKALPENVKYGIVLDAGSSHTSLYIYKWPAEKENDTGVVHQVEECRVKGPGISKFVQKVNEIGIYLTDCMERAREVIPRSQHQETPVYLGATAGMRLLRMESEELADRVLDVVERSLSNYPFDFQGARIITGQEEGAYGWITINYLLGKFSQKTRWFSIVPYETNNQETFGALDLGGASTQVTFVPQNQTIESPDNALQFRLYGKDYNVYTHSFLCYGKDQALWQKLAKDIQVASNEILRDPCFHPGYKKVVNVSDLYKTPCTKRFEMTLPFQQFEIQGIGNYQQCHQSILELFNTSYCPYSQCAFNGIFLPPLQGDFGAFSAFYFVMKFLNLTSEKVSQEKVTEMMKKFCAQPWEEIKTSYAGVKEKYLSEYCFSGTYILSLLLQGYHFTADSWEHIHFIGKIQGSDAGWTLGYMLNLTNMIPAEQPLSTPLSHSTYVFLMVLFSLVLFTVAIIGLLIFHKPSYFWKDMV

SEQ ID NO: 50 - protein, 1306 aa, Homo sapiens
MTMYLWLKLLAFGFAFLDTEVFVTGQSPTPSPTGLTTAKMPSVPLSSDPLPTHTTAFSPASTFERENDFSETTTSLSPDNTSTQVSPDSLDNASAFNTTGVSSVQTPHLPTHADSQTPSAGTDTQTFSGSAANAKLNPTPGSNAISDVPGERSTASTFPTDPVSPLTTTLSLAHHSSAALPARTSNTTITANTSDAYLNASETTTLSPSGSAVISTTTIATTPSKPTCDEKYANITVDYLYNKETKLFTAKLNVNENVECGNNTCTNNEVHNLTECKNASVSISHNSCTAPDKTLILDVPPGVEKFQLHDCTQVEKADTTICLKWKNIETFTCDTQNITYRFQCGNMIFDNKEIKLENLEPEHEYKCDSEILYNNHKFTNASKIIKTDFGSPGEPQIIFCRSEAAHQGVITWNPPQRSFHNFTLCYIKETEKDCLNLDKNLIKYDLQNLKPYTKYVLSLHAYIIAKVQRNGSAAMCHFTTKSAPPSQVWNMTVSMTSDNSMHVKCRPPRDRNGPHERYHLEVEAGNTLVRNESHKNCDFRVKDLQYSTDYTFKAYFHNGDYPGEPFILHHSTSYNSKALIAFLAFLIIVTSIALLVVLYKIYDLHKKRSCNLDEQQELVERDDEKQLMNVEPIHADILLETYKRKIADEGRLFLAEFQSIPRVFSKFPIKEARKPFNQNKNRYVDILPYDYNRVELSEINGDAGSNYINASYIDGFKEPRKYIAAQGPRDETVDDFWRMIWEQKATVIVMVTRCEEGNRNKCAEYWPSMEEGTRAFGDVVVKINQHKRCPDYIIQKLNIVNKKEKATGREVTHIQFTSWPDHGVPEDPHLLLKLRRRVNAFSNFFSGPIVVHCSAGVGRTGTYIGIDAMLEGLEAENKVDVYGYVVKLRRQRCLMVQVEAQYILIHQALVEYNQFGETEVNLSELHPYLHNMKKRDPPSEPSPLEAEFQRLPSYRSWRTQHIGNQEENKSKNRNSNVIPYDYNRVPLKHELEMSKESEHDSDESSDDDSDSEEPSKYINASFIMSYWKPEVMIAAQGPLKETIGDFWQMIFQRKVKVIVMLTELKHGDQEICAQYWGEGKQTYGDIEVDLKDTDKSSTYTLRVFELRHSKRKDSRTVYQYQYTNWSVEQLPAEPKELISMIQVVKQKLPQKNSSEGNKHHKSTPLLIHCRDGSQQTGIFCALLNLLESAETEEVVDIFQVVKALRKARPGMVSTFEQYQFLYDVIASTYPAQNGQVKKNNHQEDKIEFDNEVDKVKQDANCVNPLGAPEKLPEAKEQAEGSEPTSGTEGPEHSVNGPASPALNQGS

SEQ ID NO: 51 - protein, 354 aa, Homo sapiens
MRLAVLFSGALLGLLAAQGTGNDCPHKKSATLLPSFTVTPTVTESTGTTSHRTTKSHKTTTHRTTTTGTTSHGPTTATHNPTTTSHGNVTVHPTSNSTATSQGPSTATHSPATTSHGNATVHPTSNSTATSPGFTSSAHPEPPPPSPSPSPTSKETIGDYTWTNGSQPCVHLQAQIQIRVMYTTQGGGEAWGISVLNPNKTKVQGSCEGAHPHLLLSFPYGHLSFGFMQDLQQKVVYLSYMAVEYNVSFPHAAQWTFSAQNASLRDLQAPLGQSFSCSNSSIILSPAVHLDLLSLRLQAAQLPHTGVFGQSFSCPSDRSILLPLIIGLILLGLLALVLIAFCIIRRRPSAYQAL

SEQ ID NO: 52 - protein, 972 aa, Homo sapiens
MGPGVLLLLLVATAWHGQGIPVIEPSVPELVVKPGATVTLRCVGNGSVEWDGPPSPHWTLYSDGSSSILSTNNATFQNTGTYRCTEPGDPLGGSAAIHLYVKDPARPWNVLAQEVVVFEDQDALLPCLLTDPVLEAGVSLVRVRGRPLMRHTNYSFSPWHGFTIHRAKFIQSQDYQCSALMGGRKVMSISIRLKVQKVIPGPPALTLVPAELVRIRGEAAQIVCSASSVDVNFDVFLQHNNTKLAIPQQSDFHNNRYQKVLTLNLDQVDFQHAGNYSCVASNVQGKHSTSMFFRVVESAYLNLSSEQNLIQEVTVGEGLNLKVMVEAYPGLQGFNWTYLGPFSDHQPEPKLANATTKDTYRHTFTLSLPRLKPSEAGRYSFLARNPGGWRALTFELTLRYPPEVSVIWTFINGSGTLLCAASGYPQPNVTWLQCSGHTDRCDEAQVLQVWDDPYPEVLSQEPFHKVTVQSLLTVETLEHNQTYECRAHNSVGSGSWAFIPISAGAHTHPPDEFLFTPVVVACMSIMALLLLLLLLLLYKYKQKPKYQVRWKIIESYEGNSYTFIDPTQLPYNEKWEFPRNNLQFGKTLGAGAFGKVVEATAFGLGKEDAVLKVAVKMLKSTAHADEKEALMSELKIMSHLGQHENIVNLLGACTHGGPVLVITEYCCYGDLLNFLRRKAEAMLGPSLSPGQDPEGGVDYKNIHLEKKYVRRDSGFSSQGVDTYVEMRPVSTSSNDSFSEQDLDKEDGRPLELRDLLHFSSQVAQGMAFLASKNCIHRDVAARNVLLTNGHVAKIGDFGLARDIMNDSNYIVKGNARLPVKWMAPESIFDCVYTVQSDVWSYGILLWEIFSLGLNPYPGILVNSKFYKLVKDGYQMAQPAFAPKNIYSIMQACWALEPTHRPTFQQICSFLQEQAQEDRRERDYTNLPSSSRSGGSGSSSSELEEESSSEHLTCCEQGDIAQPLLQPNNYQFC

SEQ ID NO: 53 - protein, 1156 aa, Homo sapiens
MSKLRMVLLEDSGSADFRRHFVNLSPFTITVVLLLSACFVTSSLGGTDKELRLVDGENKCSGRVEVKVQEEWGTVCNNGWSMEAVSVICNQLGCPTAIKAPGWANSSAGSGRIWMDHVSCRGNESALWDCKHDGWGKHSNCTHQQDAGVTCSDGSNLEMRLTRGGNMCSGRIEIKFQGRWGTVCDDNFNIDHASVICRQLECGSAVSFSGSSNFGEGSGPIWFDDLICNGNESALWNCKHQGWGKHNCDHAEDAGVICSKGADLSLRLVDGVTECSGRLEVRFQGEWGTICDDGWDSYDAAVACKQLGCPTAVTAIGRVNASKGFGHIWLDSVSCQGHEPAIWQCKHHEWGKHYCNHNEDAGVTCSDGSDLELRLRGGGSRCAGTVEVEIQRLLGKVCDRGWGLKEADVVCRQLGCGSALKTSYQVYSKIQATNTWLFLSSCNGNETSLWDCKNWQWGGLTCDHYEEAKITCSAHREPRLVGGDIPCSGRVEVKHGDTWGSICDSDFSLEAASVLCRELQCGTVVSILGGAHFGEGNGQIWAEEFQCEGHESHLSLCPVAPRPEGTCSHSRDVGVVCSRYTEIRLVNGKTPCEGRVELKTLGAWGSLCNSHWDIEDAHVLCQQLKCGVALSTPGGARFGKGNGQIWRHMFHCTGTEQHMGDCPVTALGASLCPSEQVASVICSGNQSQTLSSCNSSSLGPTRPTIPEESAVACIESGQLRLVNGGGRCAGRVEIYHEGSWGTICDDSWDLSDAHVVCRQLGCGEAINATGSAHFGEGTGPIWLDEMKCNGKESRIWQCHSHGWGQQNCRHKEDAGVICSEFMSLRLTSEASREACAGRLEVFYNGAWGTVGKSSMSETTVGVVCRQLGCADKGKINPASLDKAMSIPMWVDNVQCPKGPDTLWQCPSSPWEKRLASPSEETWITCDNKIRLQEGPTSCSGRVEIWHGGSWGTVCDDSWDLDDAQVVCQQLGCGPALKAFKEAEFGQGTGPIWLNEVKCKGNESSLWDCPARRWGHSECGHKEDAAVNCTDISVQKTPQKATTGRSSRQSSFIAVGILGVVLLAIFVALFFLTKKRRQRQRLAVSSRGENLVHQIQYREMNSCLNADDLDLMNSSENSHESADFSAAELISVSKFLPISGMEKEAILSHTEKENGNL

SEQ ID NO: 54 - protein, 355 aa, Homo sapiens
MDQFPESVTENFEYDDLAEACYIGDIVVFGTVFLSIFYSVIFAIGLVGNLLVVFALTNSKKPKSVTDIYLLNLALSDLLFVATLPFWTHYLINEKGLHNAMCKFTTAFFFIGFFGSIFFITVISIDRYLAIVLAANSMNNRTVQHGVTISLGVWAAAILVAAPQFMFTKQKENECLGDYPEVLQEIWPVLRNVETNFLGFLLPLLIMSYCYFRIIQTLFSCKNHKKAKAIKLILLVVIVFFLFWTPYNVMIFLETLKLYDFFPSCDMRKDLRLALSVTETVAFSHCCLNPLIYAFAGEKFRRYLYHLYGKCLAVLCGRSVHVDFSSSESQRSRHGSVLSSNFTYHTSDGDALLLL

SEQ ID NO: 55 - protein, 230 aa, Homo sapiens
MEPLRLLILLFVTELSGAHNTTVFQGVAGQSLQVSCPYDSMKHWGRRKAWCRQLGEKGPCQRVVSTHNLWLLSFLRRWNGSTAITDDTLGGTLTITLRNLQPHDAGLYQCQSLHGSEADTLRKVLVEVLADPLDHRDAGDLWFPGESESFEDAHVEHSISRSLLEGEIPFPPTSILLLLACIFLIKILAASALWAAAWHGQKPGTHPPSELDCGHDPGYQLQTLPGLRDT

SEQ ID NO: 56 - protein, 342 aa, Homo sapiens
MQAVDNLTSAPGNTSLCTRDYKITQVLFPLLYTVLFFVGLITNGLAMRIFFQIRSKSNFIIFLKNTVISDLLMILTFPFKILSDAKLGTGPLRTFVCQVTSVIFYFTMYISISFLGLITIDRYQKTTRPFKTSNPKNLLGAKILSVVIWAFMFLLSLPNMILTNRQPRDKNVKKCSFLKSEFGLVWHEIVNYICQVIFWINFLIVIVCYTLITKELYRSYVRTRGVGKVPRKKVNVKVFIIIAVFFICFVPFHFARIPYTLSQTRDVFDCTAENTLFYVKESTLWLTSLNACLDPFIYFFLCKSFRNSLISMLKCPNSATSLSQDNRKKEQDGGDPNEETPM

SEQ ID NO: 57 - protein, 283 aa, Homo sapiens
MVSAAAPSLLILLLLLLGSVPATDARSVPLKATFLEDVAGSGEAEGSSASSPSLPPPWTPALSPTSMGPQPITLGGPSPPTNFLDGIVDFFRQYVMLIAVVGSLAFLLMFIVCAAVITRQKQKASAYYPSSFPKKKYVDQSDRAGGPRAFSEVPDRAPDSRPEEALDSSRQLQADILAATQNLKSPTRAALGGGDGARMVEGRGAEEEEKGSQEGDQEVQGHGVPVETPEAQEEPCSGVLEGAVVAGEGQGELEGSLLLAQEAQGPVGPPESPCACSSVHPSV

SEQ ID NO: 58 - protein, 254 aa, Homo sapiens
MAISGVPVLGFFIIAVLMSAQESWAIKEEHVIIQAEFYLNPDQSGEFMFDFDGDEIFHVDMAKKETVWRLEEFGRFASFEAQGALANIAVDKANLEIMTKRSNYTPITNVPPEVTVLTNSPVELREPNVLICFIDKFTPPVVNVTWLRNGKPVTTGVSETVFLPREDHLFRKFHYLPFLPSTEDVYDCRVEHWGLDEPLLKHWEFDAPSPLPETTENVVCALGLTVGLVGIIIGTIFIIKGVRKSNAAERRGPL

SEQ ID NO: 59 - DNA, 20 bp, Homo sapiens
  source 1..20: mol_type = unassigned DNA
ggtatgtttcatccactggc

SEQ ID NO: 60 - DNA, 20 bp, Homo sapiens
  source 1..20: mol_type = genomic DNA
gtctatacaaaggaagacct

SEQ ID NO: 61 - DNA, 7844 bp, synthetic construct
  source 1..7844: mol_type = other DNA; note = vector PUC_AAVS1_p-Resp-(PU.1-CEBPB)
gaactttaaaagtgctcatcattggaaaacgttcttcggggcgaaaactctcaaggatcttaccgctgttgagatccagttcgatgtaacccactcgtgcacccaactgatcttcagcatcttttactttcaccagcgtttctgggtgagcaaaaacaggaaggcaaaatgccgcaaaaaagggaataagggcgacacggaaatgttgaatactcatactcttcctttttcaatattattgaagcatttatcagggttattgtctcatgagcggatacatatttgaatgtatttagaaaaataaacaaataggggttccgcgcacatttccccgaaaagtgccacctgacgtctaagaaaccattattatcatgacattaacctataaaaataggcgtatcacgaggccctttcgtctcgcgcgtttcggtgatgacggtgaaaacctctgacacatgcagctcccggagacggtcacagcttgtctgtaagcggatgccgggagcagacaagcccgtcagggcgcgtcagcgggtgttggcgggtgtcggggctggcttaactatgcggcatcagagcagattgtactgagagtgcaccatatgcggtgtgaaataccgcacagatgcgtaaggagaaaataccgcatcaggcgccattcgccattcaggctgcgcaactgttgggaagggcgatcggtgcgggcctcttcgctattacgccagctggcgaaagggggatgtgctgcaaggcgattaagttgggtaacgccagggttttcccagtcacgacgttgtaaaacgacggccagtgaattgtgctttctctgaccagcattctctcccctgggcctgtgccgctttctgtctgtagcttgtggcctgggtcacctctacggctggcccagatccttccctgccgcctccttcaggttccgtcttcctccactccctcttccccttgctctctgctgtgttgctgcccaaggatgctctttccggagcacttccttctcggcgctgcaccacgtgatgtcctctgagcggatcctccccgtgtctgggtcctctccgggcatctctcctccctcacccaaccccatgccgtcttcactcgctgggttcccttttccttctccttctggggcctgtgccatctctcgtttcttaggatggccttctccgacggatgtctcccttgcgtcccgcctccccttcttgtaggcctgcatcatcaccgtttttctggacaaccccaaagtaccccgtctccctggctttagccacctctccatcctcttgctttctttgcctggacaccccgttctcctgtggattcgggtcacctctcactcctttcatttgggcagctcccctaccccccttacctctctagtctgtgctagctcttccagccccctgtcatggcatcttccaggggtccgagagctcagctagtcttcttcctccaacccgggcccctatgtccacttcaggacagcatgtttgctgcctccagggatcctgtgtccccgagctgggaccaccttatattcccagggccggttaatgtggctctggttctgggtacttttatctgtcccctccaccccacagtggggcaagcttctgacctcttctcttcctcccacagggcctcgagagatctggcagcggagagggcagaggaagtcttctaacatgcggtgacgtggaggagaatcccggccctaggctcgagatgaccgagtacaagcccacggtgcgcctcgccacccgcgacgacgtccccagggccgtacgcaccctcgccgccgcgttcgccgactaccccgccacgcgccacaccgtcgatccggaccgccacatcgagcgggtcaccgagctgcaagaactcttcctcacgcgcgtcgggctcgacatcggcaaggtgtgggtcgcggacgacggcgccgcggtggcggtctggaccacgccggagagcgtcgaagcgggggcggtgttcgccgagatcggcccgcgcatggccgagttgagcggttcccggctggccgcgcagcaacagatggaaggcctcctggcgccgcaccggcccaaggagcccgcgtggttcctggccaccgtcggcgtctcgcccgaccaccagggcaagggtctgggcagcgccgtcgtgctccccggagtggaggcggccgagcgcgccggggtgcccgccttcctggagacctccgcgccccgcaacctccccttctacgagcggctcggcttcaccgtcaccgccgacgtcgaggtgcccgaaggaccgcgcacctggtgcatgacccgcaagcccggtgcctgatctagagggcccgtttaaacccgctgatcagcctcgactgtgccttctagttgccagccatctgttgtttgcccctcccccgtgccttccttgaccctggaaggtgccactcccactgtcctttcctaataaaatgaggaaattgcatcgcattgtctgagtaggtgtcattctattctggggggtggggtggggcaggacagcaagggggaggattgggaagacaatagcaggcatgctggggatgcggtgggctctatggtcactcgagtttactccctatcagtgatagagaacgtatgaagagtttactccctatcagtgatagagaacgtatgcagactttactccctatcagtgatagagaacgtataaggagtttactccctatcagtgatagagaacgtatgaccagtttactccctatcagtgatagagaacgtatctacagtttactccctatcagtgatagagaacgtatatccagtttactccctatcagtgatagagaacgtatgtcgaggtaggcgtgtacggtgggcgcctataaaagcagagctcgtttagtgaaccgtcagatcgcctggagcaattccacaacacttttgtcttatacttactagtgccaccatgttacaggcgtgcaaaatggaagggtttcccctcgtcccccctccatcagaagacctggtgccctatgacacggatctataccaacgccaaacgcacgagtattacccctatctcagcagtgatggggagagccatagcgaccattactgggacttccacccccaccacgtgcacagcgagttcgagagcttcgccgagaacaacttcacggagctccagagcgtgcagcccccgcagctgcagcagctctaccgccacatggagctggagcagatgcacgtcctcgatacccccatggtgccaccccatcccagtcttggccaccaggtctcctacctgccccggatgtgcctccagtacccatccctgtccccagcccagcccagctcagatgaggaggagggcgagcggcagagccccccactggaggtgtctgacggcgaggcggatggcctggagcccgggcctgggctcctgcctggggagacaggcagcaagaagaagatccgcctgtaccagttcctgttggacctgctccgcagcggcgacatgaaggacagcatctggtgggtggacaaggacaagggcaccttccagttctcgtccaagcacaaggaggcgctggcgcaccgctggggcatccagaagggcaaccgcaagaagatgacctaccagaagatggcgcgcgcgctgcgcaactacggcaagacgggcgaggtcaagaaggtgaagaagaagctcacctaccagttcagcggcgaagtgctgggccgcgggggcctggccgagcggcgccacccgccccacggatcgggagagggcaggggaagtcttctaacatgcggggacgtggaggaaaatcccggccccatgcaacgcctggtggcctgggacccagcatgtctccccctgccgccgccgccgcctgcctttaaatccatggaagtggccaacttctactacgaggcggactgcttggctgctgcgtacggcggcaaggcggcccccgcggcgccccccgcggccagacccgggccgcgcccccccgccggcgagctgggcagcatcggcgaccacgagcgcgccatcgacttcagcccgtacctggagccgctgggcgcgccgcaggccccggcgcccgccacggccacggacaccttcgaggcggctccgcccgcgcccgcccccgcgcccgcctcctccgggcagcaccacgacttcctctccgacctcttctccgacgactacgggggcaagaactgcaagaagccggccgagtacggctacgtgagcctggggcgcctgggggccgccaagggcgcgctgcaccccggctgcttcgcgcccctgcacccaccgcccccgccgccgccgccgcccgccgagctcaaggcggagccgggcttcgagcccgcggactgcaagcggaaggaggaggccggggcgccgggcggcggcgcaggcatggcggcgggcttcccgtacgcgctgcgcgcttacctcggctaccaggcggtgccgagcggcagcagcgggagcctctccacgtcctcctcgtccagcccgcccggcacgccgagccccgctgacgccaaggcgcccccgaccgcctgctacgcgggggccgcgccggcgccctcgcaggtcaagagcaaggccaagaagaccgtggacaagcacagcgacgagtacaagatccggcgcgagcgcaacaacatcgccgtgcgcaagagccgcgacaaggccaagatgcgcaacctggagacgcagcacaaggtcctggagctcacggccgagaacgagcggctgcagaagaaggtggagcagctgtcgcgcgagctcagcaccctgcggaacttgttcaagcagctgcccgagcccctgctcgcctcctccggccactgctaggaattcgagctcggtacccggggatcctctagtcagctgacgcgtgctagcgcggccgcatcgataagcttgtcgacgatatctctagaggatcataatcagccataccacatttgtagaggttttacttgctttaaaaaacctcccacacctccccctgaacctgaaacataaaatgaatgcaattgttgttgttaacttgtttattgcagcttataatggttacaaataaagcaatagcatcacaaatttcacaaataaagcatttttttcactgccttgacagtactcttaagtcgacttactagggacaggattggtgacagaaaagccccatccttaggcctcctccttcctagtctcctgatattgggtctaacccccacctcctgttaggcagattccttatctggtgacacacccccatttcctggagccatctctctccttgccagaacctctaaggtttgcttacgatggagccagagaggatcctgggagggagagcttggcagggggtgggagggaagggggggatgcgtgacctgcccggttctcagtggccaccctgcgctaccctctcccagaacctgagctgctctgacgcggctgtctggtgcgtttcactgatcctggtgctgcagcttccttacacttcccaagaggagaagcagtttggaaaaacaaaatcagaataagttggtcctgagttctaactttggctcttcacctttctagtccccaatttatattgttcctccgtgcgtcagttttacctgtgagataaggccagtagccagccccgtcctggcagggctgtggtgaggaggggggtgtccgtgtggaaaactccctttgtgagaatggtgcgtcctaggtgttcaccaggtcgtggccgcctctactccctttctctttctccatccttctttccttaaagagtccccagtgctatctgggacatattcctccgcccagagcagggtcccgcttccctaaggccctgctctgggcttctgggtttgagtccttggcaagcccaggagaggcgctcaggcttccctgtcccccttcctcgtccaccatctcatgcccctggctctcctgccccttccctacaggggttcctggctctgctctaagcttggcgtaatcatggtcatagctgtttcctgtgtgaaattgttatccgctcacaattccacacaacatacgagccggaagcataaagtgtaaagcctggggtgcctaatgagtgagctaactcacattaattgcgttgcgctcactgcccgctttccagtcgggaaacctgtcgtgccagctgcattaatgaatcggccaacgcgcggggagaggcggtttgcgtattgggcgctcttccgcttcctcgctcactgactcgctgcgctcggtcgttcggctgcggcgagcggtatcagctcactcaaaggcggtaatacggttatccacagaatcaggggataacgcaggaaagaacatgtgagcaaaaggccagcaaaaggccaggaaccgtaaaaaggccgcgttgctggcgtttttccataggctccgcccccctgacgagcatcacaaaaatcgacgctcaagtcagaggtggcgaaacccgacaggactataaagataccaggcgtttccccctggaagctccctcgtgcgctctcctgttccgaccctgccgcttaccggatacctgtccgcctttctcccttcgggaagcgtggcgctttctcatagctcacgctgtaggtatctcagttcggtgtaggtcgttcgctccaagctgggctgtgtgcacgaaccccccgttcagcccgaccgctgcgccttatccggtaactatcgtcttgagtccaacccggtaagacacgacttatcgccactggcagcagccactggtaacaggattagcagagcgaggtatgtaggcggtgctacagagttcttgaagtggtggcctaactacggctacactagaagaacagtatttggtatctgcgctctgctgaagccagttaccttcggaaaaagagttggtagctcttgatccggcaaacaaaccaccgctggtagcggtggtttttttgtttgcaagcagcagattacgcgcagaaaaaaaggatctcaagaagatcctttgatcttttctacggggtctgacgctcagtggaacgaaaactcacgttaagggattttggtcatgagattatcaaaaaggatcttcacctagatccttttaaattaaaaatgaagttttaaatcaatctaaagtatatatgagtaaacttggtctgacagttaccaatgcttaatcagtgaggcacctatctcagcgatctgtctatttcgttcatccatagttgcctgactccccgtcgtgtagataactacgatacgggagggcttaccatctggccccagtgctgcaatgataccgcgagacccacgctcaccggctccagatttatcagcaataaaccagccagccggaagggccgagcgcagaagtggtcctgcaactttatccgcctccatccagtctattaattgttgccgggaagctagagtaagtagttcgccagttaatagtttgcgcaacgttgttgccattgctacaggcatcgtggtgtcacgctcgtcgtttggtatggcttcattcagctccggttcccaacgatcaaggcgagttacatgatcccccatgttgtgcaaaaaagcggttagctccttcggtcctccgatcgttgtcagaagtaagttggccgcagtgttatcactcatggttatggcagcactgcataattctcttactgtcatgccatccgtaagatgcttttctgtgactggtgagtactcaaccaagtcattctgagaatagtgtatgcggcgaccgagttgctcttgcccggcgtcaatacgggataataccgcgccacatagca

SEQ ID NO: 62 - DNA, 8087 bp, synthetic construct
  source 1..8087: mol_type = other DNA; note = vector pUC_AAVS1_p-Resp-(PU.1-IRF8)
gaactttaaaagtgctcatcattggaaaacgttcttcggggcgaaaactctcaaggatcttaccgctgttgagatccagttcgatgtaacccactcgtgcacccaactgatcttcagcatcttttactttcaccagcgtttctgggtgagcaaaaacaggaaggcaaaatgccgcaaaaaagggaataagggcgacacggaaatgttgaatactcatactcttcctttttcaatattattgaagcatttatcagggttattgtctcatgagcggatacatatttgaatgtatttagaaaaataaacaaataggggttccgcgcacatttccccgaaaagtgccacctgacgtctaagaaaccattattatcatgacattaacctataaaaataggcgtatcacgaggccctttcgtctcgcgcgtttcggtgatgacggtgaaaacctctgacacatgcagctcccggagacggtcacagcttgtctgtaagcggatgccgggagcagacaagcccgtcagggcgcgtcagcgggtgttggcgggtgtcggggctggcttaactatgcggcatcagagcagattgtactgagagtgcaccatatgcggtgtgaaataccgcacagatgcgtaaggagaaaataccgcatcaggcgccattcgccattcaggctgcgcaactgttgggaagggcgatcggtgcgggcctcttcgctattacgccagctggcgaaagggggatgtgctgcaaggcgattaagttgggtaacgccagggttttcccagtcacgacgttgtaaaacgacggccagtgaattgtgctttctctgaccagcattctctcccctgggcctgtgccgctttctgtctgtagcttgtggcctgggtcacctctacggctggcccagatccttccctgccgcctccttcaggttccgtcttcctccactccctcttccccttgctctctgctgtgttgctgcccaaggatgctctttccggagcacttccttctcggcgctgcaccacgtgatgtcctctgagcggatcctccccgtgtctgggtcctctccgggcatctctcctccctcacccaaccccatgccgtcttcactcgctgggttcccttttccttctccttctggggcctgtgccatctctcgtttcttaggatggccttctccgacggatgtctcccttgcgtcccgcctccccttcttgtaggcctgcatcatcaccgtttttctggacaaccccaaagtaccccgtctccctggctttagccacctctccatcctcttgctttctttgcctggacaccccgttctcctgtggattcgggtcacctctcactcctttcatttgggcagctcccctaccccccttacctctctagtctgtgctagctcttccagccccctgtcatggcatcttccaggggtccgagagctcagctagtcttcttcctccaacccgggcccctatgtccacttcaggacagcatgtttgctgcctccagggatcctgtgtccccgagctgggaccaccttatattcccagggccggttaatgtggctctggttctgggtacttttatctgtcccctccaccccacagtggggcaagcttctgacctcttctcttcctcccacagggcctcgagagatctggcagcggagagggcagaggaagtcttctaacatgcggtgacgtggaggagaatcccggccctaggctcgagatgaccgagtacaagcccacggtgcgcctcgccacccgcgacgacgtccccagggccgtacgcaccctcgccgccgcgttcgccgactaccccgccacgcgccacaccgtcgatccggaccgccacatcgagcgggtcaccgagctgcaagaactcttcctcacgcgcgtcgggctcgacatcggcaaggtgtgggtcgcggacgacggcgccgcggtggcggtctggaccacgccggagagcgtcgaagcgggggcggtgttcgccgagatcggcccgcgcatggccgagttgagcggttcccggctggccgcgcagcaacagatggaaggcctcctggcgccgcaccggcccaaggagcccgcgtggttcctggccaccgtcggcgtctcgcccgaccaccagggcaagggtctgggcagcgccgtcgtgctccccggagtggaggcggccgagcgcgccggggtgcccgccttcctggagacctccgcgccccgcaacctccccttctacgagcggctcggcttcaccgtcaccgccgacgtcgaggtgcccgaaggaccgcgcacctggtgcatgacccgcaagcccggtgcctgatctagagggcccgtttaaacccgctgatcagcctcgactgtgccttctagttgccagccatctgttgtttgcccctcccccgtgccttccttgaccctggaaggtgccactcccactgtcctttcctaataaaatgaggaaattgcatcgcattgtctgagtaggtgtcattctattctggggggtggggtggggcaggacagcaagggggaggattgggaagacaatagcaggcatgctggggatgcggtgggctctatggtcactcgagtttactccctatcagtgatagagaacgtatgaagagtttactccctatcagtgatagagaacgtatgcagactttactccctatcagtgatagagaacgtataaggagtttactccctatcagtgatagagaacgtatgaccagtttactccctatcagtgatagagaacgtatctacagtttactccctatcagtgatagagaacgtatatccagtttactccctatcagtgatagagaacgtatgtcgaggtaggcgtgtacggtgggcgcctataaaagcagagctcgtttagtgaaccgtcagatcgcctggagcaattccacaacacttttgtcttatacttactagtgccaccatgttacaggcgtgcaaaatggaagggtttcccctcgtcccccctccatcagaagacctggtgccctatgacacggatctataccaacgccaaacgcacgagtattacccctatctcagcagtgatggggagagccatagcgaccattactgggacttccacccccaccacgtgcacagcgagttcgagagcttcgccgagaacaacttcacggagctccagagcgtgcagcccccgcagctgcagcagctctaccgccacatggagctggagcagatgcacgtcctcgatacccccatggtgccaccccatcccagtcttggccaccaggtctcctacctgccccggatgtgcctccagtacccatccctgtccccagcccagcccagctcagatgaggaggagggcgagcggcagagccccccactggaggtgtctgacggcgaggcggatggcctggagcccgggcctgggctcctgcctggggagacaggcagcaagaagaagatccgcctgtaccagttcctgttggacctgctccgcagcggcgacatgaaggacagcatctggtgggtggacaaggacaagggcaccttccagttctcgtccaagcacaaggaggcgctggcgcaccgctggggcatccagaagggcaaccgcaagaagatgacctaccagaagatggcgcgcgcgctgcgcaactacggcaagacgggcgaggtcaagaaggtgaagaagaagctcacctaccagttcagcggcgaagtgctgggccgcgggggcctggccgagcggcgccacccgccccacggatcgggagagggcaggggaagtcttctaacatgcggggacgtggaggaaaatcccggccccatgtgtgaccggaatggtggtcggcggcttcgacagtggctgatcgagcagattgacagtagcatgtatccaggactgatttgggagaatgaggagaagagcatgttccggatcccttggaaacacgctggcaagcaagattataatcaggaagtggatgcctccatttttaaggcctgggcagtttttaaagggaagtttaaagaaggggacaaagctgaaccagccacttggaagacgaggttacgctgtgctttgaataagagcccagattttgaggaagtgacggaccggtcccaactggacatttccgagccatacaaagtttaccgaattgttcctgaggaagagcaaaaatgcaaactaggcgtggcaactgctggctgcgtgaatgaagttacagagatggagtgcggtcgctctgaaatcgacgagctgatcaaggagccttctgtggacgattacatggggatgatcaaaaggagcccttccccgccggaggcctgtcggagtcagctccttccagactggtgggcgcagcagcccagcacaggcgtgccgctggtgacggggtacaccacctacgacgcgcaccattcagcattctcccagatggtgatcagcttctactatgggggcaagctggtgggccaggccaccaccacctgccccgagggctgccgcctgtccctgagccagcctgggctgcccggcaccaagctgtatgggcccgagggcctggagctggtgcgcttcccgccggccgacgccatccccagcgagcgacagaggcaggtgacgcggaagctgttcgggcacctggagcgcggggtgctgctgcacagcagccggcagggcgtgttcgtcaagcggctgtgccagggccgcgtgttctgcagcggcaacgccgtggtgtgcaaaggcaggcccaacaagctggagcgtgatgaggtggtccaggtcttcgacaccagccagttcttccgagagctgcagcagttctataacagccagggccggcttcctgacggcagggtggtgctgtgctttggggaagagtttccggatatggcccccttgcgctccaaactcattctcgtgcagattgagcagctgtatgtccggcaactggcagaagaggctgggaagagctgtggagccggctctgtgatgcaggcccccgaggagccgccgccagaccaggtcttccggatgtttccagatatttgtgcctcacaccagagatcatttttcagagaaaaccaacagatcaccgtctaagaattcgagctcggtacccggggatcctctagtcagctgacgcgtgctagcgcggccgcatcgataagcttgtcgacgatatctctagaggatcataatcagccataccacatttgtagaggttttacttgctttaaaaaacctcccacacctccccctgaacctgaaacataaaatgaatgcaattgttgttgttaacttgtttattgcagcttataatggttacaaataaagcaatagcatcacaaatttcacaaataaagcatttttttcactgccttgacagtactcttaagtcgacttactagggacaggattggtgacagaaaagccccatccttaggcctcctccttcctagtctcctgatattgggtctaacccccacctcctgttaggcagattccttatctggtgacacacccccatttcctggagccatctctctccttgccagaacctctaaggtttgcttacgatggagccagagaggatcctgggagggagagcttggcagggggtgggagggaagggggggatgcgtgacctgcccggttctcagtggccaccctgcgctaccctctcccagaacctgagctgctctgacgcggctgtctggtgcgtttcactgatcctggtgctgcagcttccttacacttcccaagaggagaagcagtttggaaaaacaaaatcagaataagttggtcctgagttctaactttggctcttcacctttctagtccccaatttatattgttcctccgtgcgtcagttttacctgtgagataaggccagtagccagccccgtcctggcagggctgtggtgaggaggggggtgtccgtgtggaaaactccctttgtgagaatggtgcgtcctaggtgttcaccaggtcgtggccgcctctactccctttctctttctccatccttctttccttaaagagtccccagtgctatctgggacatattcctccgcccagagcagggtcccgcttccctaaggccctgctctgggcttctgggtttgagtccttggcaagcccaggagaggcgctcaggcttccctgtcccccttcctcgtccaccatctcatgcccctggctctcctgccccttccctacaggggttcctggctctgctctaagcttggcgtaatcatggtcatagctgtttcctgtgtgaaattgttatccgctcacaattccacacaacatacgagccggaagcataaagtgtaaagcctggggtgcctaatgagtgagctaactcacattaattgcgttgcgctcactgcccgctttccagtcgggaaacctgtcgtgccagctgcattaatgaatcggccaacgcgcggggagaggcggtttgcgtattgggcgctcttccgcttcctcgctcactgactcgctgcgctcggtcgttcggctgcggcgagcggtatcagctcactcaaaggcggtaatacggttatccacagaatcaggggataacgcaggaaagaacatgtgagcaaaaggccagcaaaaggccaggaaccgtaaaaaggccgcgttgctggcgtttttccataggctccgcccccctgacgagcatcacaaaaatcgacgctcaagtcagaggtggcgaaacccgacaggactataaagataccaggcgtttccccctggaagctccctcgtgcgctctcctgttccgaccctgccgcttaccggatacctgtccgcctttctcccttcgggaagcgtggcgctttctcatagctcacgctgtaggtatctcagttcggtgtaggtcgttcgctccaagctgggctgtgtgcacgaaccccccgttcagcccgaccgctgcgccttatccggtaactatcgtcttgagtccaacccggtaagacacgacttatcgccactggcagcagccactggtaacaggattagcagagcgaggtatgtaggcggtgctacagagttcttgaagtggtggcctaactacggctacactagaagaacagtatttggtatctgcgctctgctgaagccagttaccttcggaaaaagagttggtagctcttgatccggcaaacaaaccaccgctggtagcggtggtttttttgtttgcaagcagcagattacgcgcagaaaaaaaggatctcaagaagatcctttgatcttttctacggggtctgacgctcagtggaacgaaaactcacgttaagggattttggtcatgagattatcaaaaaggatcttcacctagatccttttaaattaaaaatgaagttttaaatcaatctaaagtatatatgagtaaacttggtctgacagttaccaatgcttaatcagtgaggcacctatctcagcgatctgtctatttcgttcatccatagttgcctgactccccgtcgtgtagataactacgatacgggagggcttaccatctggccccagtgctgcaatgataccgcgagacccacgctcaccggctccagatttatcagcaataaaccagccagccggaagggccgagcgcagaagtggtcctgcaactttatccgcctccatccagtctattaattgttgccgggaagctagagtaagtagttcgccagttaatagtttgcgcaacgttgttgccattgctacaggcatcgtggtgtcacgctcgtcgtttggtatggcttcattcagctccggttcccaacgatcaaggcgagttacatgatcccccatgttgtgcaaaaaagcggttagctccttcggtcctccgatcgttgtcagaagtaagttggccgcagtgttatcactcatggttatggcagcactgcataattctcttactgtcatgccatccgtaagatgcttttctgtgactggtgagtactcaaccaagtcattctgagaatagtgtatgcggcgaccgagttgctcttgcccggcgtcaatacgggataataccgcgccacatagca

SEQ ID NO: 63 - DNA, 8255 bp, synthetic construct
  source 1..8255: mol_type = other DNA; note = vector pUC_AAVS1_p-Resp-(PU.1-RUNX1)
gaactttaaaagtgctcatcattggaaaacgttcttcggggcgaaaactctcaaggatcttaccgctgttgagatccagttcgatgtaacccactcgtgcacccaactgatcttcagcatcttttactttcaccagcgtttctgggtgagcaaaaacaggaaggcaaaatgccgcaaaaaagggaataagggcgacacggaaatgttgaatactcatactcttcctttttcaatattattgaagcatttatcagggttattgtctcatgagcggatacatatttgaatgtatttagaaaaataaacaaataggggttccgcgcacatttccccgaaaagtgccacctgacgtctaagaaaccattattatcatgacattaacctataaaaataggcgtatcacgaggccctttcgtctcgcgcgtttcggtgatgacggtgaaaacctctgacacatgcagctcccggagacggtcacagcttgtctgtaagcggatgccgggagcagacaagcccgtcagggcgcgtcagcgggtgttggcgggtgtcggggctggcttaactatgcggcatcagagcagattgtactgagagtgcaccatatgcggtgtgaaataccgcacagatgcgtaaggagaaaataccgcatcaggcgccattcgccattcaggctgcgcaactgttgggaagggcgatcggtgcgggcctcttcgctattacgccagctggcgaaagggggatgtgctgcaaggcgattaagttgggtaacgccagggttttcccagtcacgacgttgtaaaacgacggccagtgaattgtgctttctctgaccagcattctctcccctgggcctgtgccgctttctgtctgtagcttgtggcctgggtcacctctacggctggcccagatccttccctgccgcctccttcaggttccgtcttcctccactccctcttccccttgctctctgctgtgttgctgcccaaggatgctctttccggagcacttccttctcggcgctgcaccacgtgatgtcctctgagcggatcctccccgtgtctgggtcctctccgggcatctctcctccctcacccaaccccatgccgtcttcactcgctgggttcccttttccttctccttctggggcctgtgccatctctcgtttcttaggatggccttctccgacggatgtctcccttgcgtcccgcctccccttcttgtaggcctgcatcatcaccgtttttctggacaaccccaaagtaccccgtctccctggctttagccacctctccatcctcttgctttctttgcctggacaccccgttctcctgtggattcgggtcacctctcactcctttcatttgggcagctcccctaccccccttacctctctagtctgtgctagctcttccagccccctgtcatggcatcttccaggggtccgagagctcagctagtcttcttcctccaacccgggcccctatgtccacttcaggacagcatgtttgctgcctccagggatcctgtgtccccgagctgggaccaccttatattcccagggccggttaatgtggctctggttctgggtacttttatctgtcccctccaccccacagtggggcaagcttctgacctcttctcttcctcccacagggcctcgagagatctggcagcggagagggcagaggaagtcttctaacatgcggtgacgtggaggagaatcccggccctaggctcgagatgaccgagtacaagcccacggtgcgcctcgccacccgcgacgacgtccccagggccgtacgcaccctcgccgccgcgttcgccgactaccccgccacgcgccacaccgtcgatccggaccgccacatcgagcgggtcaccgagctgcaagaactcttcctcacgcgcgtcgggctcgacatcggcaaggtgtgggtcgcggacgacggcgccgcggtggcggtctggaccacgccggagagcgtcgaagcgggggcggtgttcgccgagatcggcccgcgcatggccgagttgagcggttcccggctggccgcgcagcaacagatggaaggcctcctggcgccgcaccggcccaaggagcccgcgtggttcctggccaccgtcggcgtctcgcccgaccaccagggcaagggtctgggcagcgccgtcgtgctccccggagtggaggcggccgagcgcgccggggtgcccgccttcctggagacctccgcgccccgcaacctccccttctacgagcggctcggcttcaccgtcaccgccgacgtcgaggtgcccgaaggaccgcgcacctggtgcatgacccgcaagcccggtgcctgatctagagggcccgtttaaacccgctgatcagcctcgactgtgccttctagttgccagccatctgttgtttgcccctcccccgtgccttccttgaccctggaaggtgccactcccactgtcctttcctaataaaatgaggaaattgcatcgcattgtctgagtaggtgtcattctattctggggggtggggtggggcaggacagcaagggggaggattgggaagacaatagcaggcatgctggggatgcggtgggctctatggtcactcgagtttactccctatcagtgatagagaacgtatgaagagtttactccctatcagtgatagagaacgtatgcagactttactccctatcagtgatagagaacgtataaggagtttactccctatcagtgatagagaacgtatgaccagtttactccctatcagtgatagagaacgtatctacagtttactccctatcagtgatagagaacgtatatccagtttactccctatcagtgatagagaacgtatgtcgaggtaggcgtgtacggtgggcgcctataaaagcagagctcgtttagtgaaccgtcagatcgcctggagcaattccacaacacttttgtcttatacttactagtgccaccatgttacaggcgtgcaaaatggaagggtttcccctcgtcccccctccatcagaagacctggtgccctatgacacggatctataccaacgccaaacgcacgagtattacccctatctcagcagtgatggggagagccatagcgaccattactgggacttccacccccaccacgtgcacagcgagttcgagagcttcgccgagaacaacttcacggagctccagagcgtgcagcccccgcagctgcagcagctctaccgccacatggagctggagcagatgcacgtcctcgatacccccatggtgccaccccatcccagtcttggccaccaggtctcctacctgccccggatgtgcctccagtacccatccctgtccccagcccagcccagctcagatgaggaggagggcgagcggcagagccccccactggaggtgtctgacggcgaggcggatggcctggagcccgggcctgggctcctgcctggggagacaggcagcaagaagaagatccgcctgtaccagttcctgttggacctgctccgcagcggcgacatgaaggacagcatctggtgggtggacaaggacaagggcaccttccagttctcgtccaagcacaaggaggcgctggcgcaccgctggggcatccagaagggcaaccgcaagaagatgacctaccagaagatggcgcgcgcgctgcgcaactacggcaagacgggcgaggtcaagaaggtgaagaagaagctcacctaccagttcagcggcgaagtgctgggccgcgggggcctggccgagcggcgccacccgccccacggatcgggagagggcaggggaagtcttctaacatgcggggacgtggaggaaaatcccggccccatggcttcagacagcatatttgagtcatttccttcgtacccacagtgcttcatgagagaatgcatacttggaatgaatccttctagagacgtccacgatgccagcacgagccgccgcttcacgccgccttccaccgcgctgagcccaggcaagatgagcgaggcgttgccgctgggcgccccggacgccggcgctgccctggccggcaagctgaggagcggcgaccgcagcatggtggaggtgctggccgaccacccgggcgagctggtgcgcaccgacagccccaacttcctctgctccgtgctgcctacgcactggcgctgcaacaagaccctgcccatcgctttcaaggtggtggccctaggggatgttccagatggcactctggtcactgtgatggctggcaatgatgaaaactactcggctgagctgagaaatgctaccgcagccatgaagaaccaggttgcaagatttaatgacctcaggtttgtcggtcgaagtggaagagggaaaagcttcactctgaccatcactgtcttcacaaacccaccgcaagtcgccacctaccacagagccatcaaaatcacagtggatgggccccgagaacctcgaagacatcggcagaaactagatgatcagaccaagcccgggagcttgtccttttccgagcggctcagtgaactggagcagctgcggcgcacagccatgagggtcagcccacaccacccagcccccacgcccaaccctcgtgcctccctgaaccactccactgcctttaaccctcagcctcagagtcagatgcaggatacaaggcagatccaaccatccccaccgtggtcctacgatcagtcctaccaatacctgggatccattgcctctccttctgtgcacccagcaacgcccatttcacctggacgtgccagcggcatgacaaccctctctgcagaactttccagtcgactctcaacggcacccgacctgacagcgttcagcgacccgcgccagttccccgcgctgccctccatctccgacccccgcatgcactatccaggcgccttcacctactccccgacgccggtcacctcgggcatcggcatcggcatgtcggccatgggctcggccacgcgctaccacacctacctgccgccgccctaccccggctcgtcgcaagcgcagggaggcccgttccaagccagctcgccctcctaccacctgtactacggcgcctcggccggctcctaccagttctccatggtgggcggcgagcgctcgccgccgcgcatcctgccgccctgcaccaacgcctccaccggctccgcgctgctcaaccccagcctcccgaaccagagcgacgtggtggaggccgagggcagccacagcaactccccgaccaacatggcgccctccgcgcgcctggaggaggccgtgtggaggccctacaccggttgagaattcgagctcggtacccggggatcctctagtcagctgacgcgtgctagcgcggccgcatcgataagcttgtcgacgatatctctagaggatcataatcagccataccacatttgtagaggttttacttgctttaaaaaacctcccacacctccccctgaacctgaaacataaaatgaatgcaattgttgttgttaacttgtttattgcagcttataatggttacaaataaagcaatagcatcacaaatttcacaaataaagcatttttttcactgccttgacagtactcttaagtcgacttactagggacaggattggtgacagaaaagccccatccttaggcctcctccttcctagtctcctgatattgggtctaacccccacctcctgttaggcagattccttatctggtgacacacccccatttcctggagccatctctctccttgccagaacctctaaggtttgcttacgatggagccagagaggatcctgggagggagagcttggcagggggtgggagggaagggggggatgcgtgacctgcccggttctcagtggccaccctgcgctaccctctcccagaacctgagctgctctgacgcggctgtctggtgcgtttcactgatcctggtgctgcagcttccttacacttcccaagaggagaagcagtttggaaaaacaaaatcagaataagttggtcctgagttctaactttggctcttcacctttctagtccccaatttatattgttcctccgtgcgtcagttttacctgtgagataaggccagtagccagccccgtcctggcagggctgtggtgaggaggggggtgtccgtgtggaaaactccctttgtgagaatggtgcgtcctaggtgttcaccaggtcgtggccgcctctactccctttctctttctccatccttctttccttaaagagtccccagtgctatctgggacatattcctccgcccagagcagggtcccgcttccctaaggccctgctctgggcttctgggtttgagtccttggcaagcccaggagaggcgctcaggcttccctgtcccccttcctcgtccaccatctcatgcccctggctctcctgccccttccctacaggggttcctggctctgctctaagcttggcgtaatcatggtcatagctgtttcctgtgtgaaattgttatccgctcacaattccacacaacatacgagccggaagcataaagtgtaaagcctggggtgcctaatgagtgagctaactcacattaattgcgttgcgctcactgcccgctttccagtcgggaaacctgtcgtgccagctgcattaatgaatcggccaacgcgcggggagaggcggtttgcgtattgggcgctcttccgcttcctcgctcactgactcgctgcgctcggtcgttcggctgcggcgagcggtatcagctcactcaaaggcggtaatacggttatccacagaatcaggggataacgcaggaaagaacatgtgagcaaaaggccagcaaaaggccaggaaccgtaaaaaggccgcgttgctggcgtttttccataggctccgcccccctgacgagcatcacaaaaatcgacgctcaagtcagaggtggcgaaacccgacaggactataaagataccaggcgtttccccctggaagctccctcgtgcgctctcctgttccgaccctgccgcttaccggatacctgtccgcctttctcccttcgggaagcgtggcgctttctcatagctcacgctgtaggtatctcagttcggtgtaggtcgttcgctccaagctgggctgtgtgcacgaaccccccgttcagcccgaccgctgcgccttatccggtaactatcgtcttgagtccaacccggtaagacacgacttatcgccactggcagcagccactggtaacaggattagcagagcgaggtatgtaggcggtgctacagagttcttgaagtggtggcctaactacggctacactagaagaacagtatttggtatctgcgctctgctgaagccagttaccttcggaaaaagagttggtagctcttgatccggcaaacaaaccaccgctggtagcggtggtttttttgtttgcaagcagcagattacgcgcagaaaaaaaggatctcaagaagatcctttgatcttttctacggggtctgacgctcagtggaacgaaaactcacgttaagggattttggtcatgagattatcaaaaaggatcttcacctagatccttttaaattaaaaatgaagttttaaatcaatctaaagtatatatgagtaaacttggtctgacagttaccaatgcttaatcagtgaggcacctatctcagcgatctgtctatttcgttcatccatagttgcctgactccccgtcgtgtagataactacgatacgggagggcttaccatctggccccagtgctgcaatgataccgcgagacccacgctcaccggctccagatttatcagcaataaaccagccagccggaagggccgagcgcagaagtggtcctgcaactttatccgcctccatccagtctattaattgttgccgggaagctagagtaagtagttcgccagttaatagtttgcgcaacgttgttgccattgctacaggcatcgtggtgtcacgctcgtcgtttggtatggcttcattcagctccggttcccaacgatcaaggcgagttacatgatcccccatgttgtgcaaaaaagcggttagctccttcggtcctccgatcgttgtcagaagtaagttggccgcagtgttatcactcatggttatggcagcactgcataattctcttactgtcatgccatccgtaagatgcttttctgtgactggtgagtactcaaccaagtcattctgagaatagtgtatgcggcgaccgagttgctcttgcccggcgtcaatacgggataataccgcgccacatagca

SEQ ID NO: 64 - DNA, 6746 bp, synthetic construct
  source 1..6746: mol_type = other DNA; note = vector pUC_AAVS1_p-Resp-(PU.1)
tcgcgcgtttcggtgatgacggtgaaaacctctgacacatgcagctcccggagacggtcacagcttgtctgtaagcggatgccgggagcagacaagcccgtcagggcgcgtcagcgggtgttggcgggtgtcggggctggcttaactatgcggcatcagagcagattgtactgagagtgcaccatatgcggtgtgaaataccgcacagatgcgtaaggagaaaataccgcatcaggcgccattcgccattcaggctgcgcaactgttgggaagggcgatcggtgcgggcctcttcgctattacgccagctggcgaaagggggatgtgctgcaaggcgattaagttgggtaacgccagggttttcccagtcacgacgttgtaaaacgacggccagtgaattgtgctttctctgaccagcattctctcccctgggcctgtgccgctttctgtctgtagcttgtggcctgggtcacctctacggctggcccagatccttccctgccgcctccttcaggttccgtcttcctccactccctcttccccttgctctctgctgtgttgctgcccaaggatgctctttccggagcacttccttctcggcgctgcaccacgtgatgtcctctgagcggatcctccccgtgtctgggtcctctccgggcatctctcctccctcacccaaccccatgccgtcttcactcgctgggttcccttttccttctccttctggggcctgtgccatctctcgtttcttaggatggccttctccgacggatgtctcccttgcgtcccgcctccccttcttgtaggcctgcatcatcaccgtttttctggacaaccccaaagtaccccgtctccctggctttagccacctctccatcctcttgctttctttgcctggacaccccgttctcctgtggattcgggtcacctctcactcctttcatttgggcagctcccctaccccccttacctctctagtctgtgctagctcttccagccccctgtcatggcatcttccaggggtccgagagctcagctagtcttcttcctccaacccgggcccctatgtccacttcaggacagcatgtttgctgcctccagggatcctgtgtccccgagctgggaccaccttatattcccagggccggttaatgtggctctggttctgggtacttttatctgtcccctccaccccacagtggggcaagcttctgacctcttctcttcctcccacagggcctcgagagatctggcagcggagagggcagaggaagtcttctaacatgcggtgacgtggaggagaatcccggccctaggctcgagatgaccgagtacaagcccacggtgcgcctcgccacccgcgacgacgtccccagggccgtacgcaccctcgccgccgcgttcgccgactaccccgccacgcgccacaccgtcgatccggaccgccacatcgagcgggtcaccgagctgcaagaactcttcctcacgcgcgtcgggctcgacatcggcaaggtgtgggtcgcggacgacggcgccgcggtggcggtctggaccacgccggagagcgtcgaagcgggggcggtgttcgccgagatcggcccgcgcatggccgagttgagcggttcccggctggccgcgcagcaacagatggaaggcctcctggcgccgcaccggcccaaggagcccgcgtggttcctggccaccgtcggcgtctcgcccgaccaccagggcaagggtctgggcagcgccgtcgtgctccccggagtggaggcggccgagcgcgccggggtgcccgccttcctggagacctccgcgccccgcaacctccccttctacgagcggctcggcttcaccgtcaccgccgacgtcgaggtgcccgaaggaccgcgcacctggtgcatgacccgcaagcccggtgcctgatctagagggcccgtttaaacccgctgatcagcctcgactgtgccttctagttgccagccatctgttgtttgcccctcccccgtgccttccttgaccctggaaggtgccactcccactgtcctttcctaataaaatgaggaaattgcatcgcattgtctgagtaggtgtcattctattctggggggtggggtggggcaggacagcaagggggaggattgggaagacaatagcaggcatgctggggatgcggtgggctctatggtcactcgagtttactccctatcagtgatagagaacgtatgaagagtttactccctatcagtgatagagaacgtatgcagactttactccctatcagtgatagagaacgtataaggagtttactccctatcagtgatagagaacgtatgaccagtttactccctatcagtgatagagaacgtatctacagtttactccctatcagtgatagagaacgtatatccagtttactccctatcagtgatagagaacgtatgtcgaggtaggcgtgtacggtgggcgcctataaaagcagagctcgtttagtgaaccgtcagatcgcctggagcaattccacaacacttttgtcttatacttactagtgccaccatgttacaggcgtgcaaaatggaagggtttcccctcgtcccccctccatcagaagacctggtgccctatgacacggatctataccaacgccaaacgcacgagtattacccctatctcagcagtgatggggagagccatagcgaccattactgggacttccacccccaccacgtgcacagcgagttcgagagcttcgccgagaacaacttcacggagctccagagcgtgcagcccccgcagctgcagcagctctaccgccacatggagctggagcagatgcacgtcctcgatacccccatggtgccaccccatcccagtcttggccaccaggtctcctacctgccccggatgtgcctccagtacccatccctgtccccagcccagcccagctcagatgaggaggagggcgagcggcagagccccccactggaggtgtctgacggcgaggcggatggcctggagcccgggcctgggctcctgcctggggagacaggcagcaagaagaagatccgcctgtaccagttcctgttggacctgctccgcagcggcgacatgaaggacagcatctggtgggtggacaaggacaagggcaccttccagttctcgtccaagcacaaggaggcgctggcgcaccgctggggcatccagaagggcaaccgcaagaagatgacctaccagaagatggcgcgcgcgctgcgcaactacggcaagacgggcgaggtcaagaaggtgaagaagaagctcacctaccagttcagcggcgaagtgctgggccgcgggggcctggccgagcggcgccacccgccccactgagaattcgagctcggtacccggggatcctctagtcagctgacgcgtgctagcgcggccgcatcgataagcttgtcgacgatatctctagaggatcataatcagccataccacatttgtagaggttttacttgctttaaaaaacctcccacacctccccctgaacctgaaacataaaatgaatgcaattgttgttgttaacttgtttattgcagcttataatggttacaaataaagcaatagcatcacaaatttcacaaataaagcatttttttcactgccttgacagtactcttaagtcgacttactagggacaggattggtgacagaaaagccccatccttaggcctcctccttcctagtctcctgatattgggtctaacccccacctcctgttaggcagattccttatctggtgacacacccccatttcctggagccatctctctccttgccagaacctctaaggtttgcttacgatggagccagagaggatcctgggagggagagcttggcagggggtgggagggaagggggggatgcgtgacctgcccggttctcagtggccaccctgcgctaccctctcccagaacctgagctgctctgacgcggctgtctggtgcgtttcactgatcctggtgctgcagcttccttacacttcccaagaggagaagcagtttggaaaaacaaaatcagaataagttggtcctgagttctaactttggctcttcacctttctagtccccaatttatattgttcctccgtgcgtcagttttacctgtgagataaggccagtagccagccccgtcctggcagggctgtggtgaggaggggggtgtccgtgtggaaaactccctttgtgagaatggtgcgtcctaggtgttcaccaggtcgtggccgcctctactccctttctctttctccatccttctttccttaaagagtccccagtgctatctgggacatattcctccgcccagagcagggtcccgcttccctaaggccctgctctgggcttctgggtttgagtccttggcaagcccaggagaggcgctcaggcttccctgtcccccttcctcgtccaccatctcatgcccctggctctcctgccccttccctacaggggttcctggctctgctctaagcttggcgtaatcatggtcatagctgtttcctgtgtgaaattgttatccgctcacaattccacacaacatacgagccggaagcataaagtgtaaagcctggggtgcctaatgagtgagctaactcacattaattgcgttgcgctcactgcccgctttccagtcgggaaacctgtcgtgccagctgcattaatgaatcggccaacgcgcggggagaggcggtttgcgtattgggcgctcttccgcttcctcgctcactgactcgctgcgctcggtcgttcggctgcggcgagcggtatcagctcactcaaaggcggtaatacggttatccacagaatcaggggataacgcaggaaagaacatgtgagcaaaaggccagcaaaaggccaggaaccgtaaaaaggccgcgttgctggcgtttttccataggctccgcccccctgacgagcatcacaaaaatcgacgctcaagtcagaggtggcgaaacccgacaggactataaagataccaggcgtttccccctggaagctccctcgtgcgctctcctgttccgaccctgccgcttaccggatacctgtccgcctttctcccttcgggaagcgtggcgctttctcatagctcacgctgtaggtatctcagttcggtgtaggtcgttcgctccaagctgggctgtgtgcacgaaccccccgttcagcccgaccgctgcgccttatccggtaactatcgtcttgagtccaacccggtaagacacgacttatcgccactggcagcagccactggtaacaggattagcagagcgaggtatgtaggcggtgctacagagttcttgaagtggtggcctaactacggctacactagaagaacagtatttggtatctgcgctctgctgaagccagttaccttcggaaaaagagttggtagctcttgatccggcaaacaaaccaccgctggtagcggtggtttttttgtttgcaagcagcagattacgcgcagaaaaaaaggatctcaagaagatcctttgatcttttctacggggtctgacgctcagtggaacgaaaactcacgttaagggattttggtcatgagattatcaaaaaggatcttcacctagatccttttaaattaaaaatgaagttttaaatcaatctaaagtatatatgagtaaacttggtctgacagttaccaatgcttaatcagtgaggcacctatctcagcgatctgtctatttcgttcatccatagttgcctgactccccgtcgtgtagataactacgatacgggagggcttaccatctggccccagtgctgcaatgataccgcgagacccacgctcaccggctccagatttatcagcaataaaccagccagccggaagggccgagcgcagaagtggtcctgcaactttatccgcctccatccagtctattaattgttgccgggaagctagagtaagtagttcgccagttaatagtttgcgcaacgttgttgccattgctacaggcatcgtggtgtcacgctcgtcgtttggtatggcttcattcagctccggttcccaacgatcaaggcgagttacatgatcccccatgttgtgcaaaaaagcggttagctccttcggtcctccgatcgttgtcagaagtaagttggccgcagtgttatcactcatggttatggcagcactgcataattctcttactgtcatgccatccgtaagatgcttttctgtgactggtgagtactcaaccaagtcattctgagaatagtgtatgcggcgaccgagttgctcttgcccggcgtcaatacgggataataccgcgccacatagcagaactttaaaagtgctcatcattggaaaacgttcttcggggcgaaaactctcaaggatcttaccgctgttgagatccagttcgatgtaacccactcgtgcacccaactgatcttcagcatcttttactttcaccagcgtttctgggtgagcaaaaacaggaaggcaaaatgccgcaaaaaagggaataagggcgacacggaaatgttgaatactcatactcttcctttttcaatattattgaagcatttatcagggttattgtctcatgagcggatacatatttgaatgtatttagaaaaataaacaaataggggttccgcgcacatttccccgaaaagtgccacctgacgtctaagaaaccattattatcatgacattaacctataaaaataggcgtatcacgaggccctttcgtc

SEQ ID NO: 65 - DNA, 10781 bp, synthetic construct
  source 1..10781: mol_type = other DNA; note = vector pUC_AAVS1_p-Resp-(PU.1-SALL1)
gaactttaaaagtgctcatcattggaaaacgttcttcggggcgaaaactctcaaggatcttaccgctgttgagatccagttcgatgtaacccactcgtgcacccaactgatcttcagcatcttttactttcaccagcgtttctgggtgagcaaaaacaggaaggcaaaatgccgcaaaaaagggaataagggcgacacggaaatgttgaatactcatactcttcctttttcaatattattgaagcatttatcagggttattgtctcatgagcggatacatatttgaatgtatttagaaaaataaacaaataggggttccgcgcacatttccccgaaaagtgccacctgacgtctaagaaaccattattatcatgacattaacctataaaaataggcgtatcacgaggccctttcgtctcgcgcgtttcggtgatgacggtgaaaacctctgacacatgcagctcccggagacggtcacagcttgtctgtaagcggatgccgggagcagacaagcccgtcagggcgcgtcagcgggtgttggcgggtgtcggggctggcttaactatgcggcatcagagcagattgtactgagagtgcaccatatgcggtgtgaaataccgcacagatgcgtaaggagaaaataccgcatcaggcgccattcgccattcaggctgcgcaactgttgggaagggcgatcggtgcgggcctcttcgctattacgccagctggcgaaagggggatgtgctgcaaggcgattaagttgggtaacgccagggttttcccagtcacgacgttgtaaaacgacggccagtgaattgtgctttctctgaccagcattctctcccctgggcctgtgccgctttctgtctgtagcttgtggcctgggtcacctctacggctggcccagatccttccctgccgcctccttcaggttccgtcttcctccactccctcttccccttgctctctgctgtgttgctgcccaaggatgctctttccggagcacttccttctcggcgctgcaccacgtgatgtcctctgagcggatcctccccgtgtctgggtcctctccgggcatctctcctccctcacccaaccccatgccgtcttcactcgctgggttcccttttccttctccttctggggcctgtgccatctctcgtttcttaggatggccttctccgacggatgtctcccttgcgtcccgcctccccttcttgtaggcctgcatcatcaccgtttttctggacaaccccaaagtaccccgtctccctggctttagccacctctccatcctcttgctttctttgcctggacaccccgttctcctgtggattcgggtcacctctcactcctttcatttgggcagctcccctaccccccttacctctctagtctgtgctagctcttccagccccctgtcatggcatcttccaggggtccgagagctcagctagtcttcttcctccaacccgggcccctatgtccacttcaggacagcatgtttgctgcctccagggatcctgtgtccccgagctgggaccaccttatattcccagggccggttaatgtggctctggttctgggtacttttatctgtcccctccaccccacagtggggcaagcttctgacctcttctcttcctcccacagggcctcgagagatctggcagcggagagggcagaggaagtcttctaacatgcggtgacgtggaggagaatcccggccctaggctcgagatgaccgagtacaagcccacggtgcgcctcgccacccgcgacgacgtccccagggccgtacgcaccctcgccgccgcgttcgccgactaccccgccacgcgccacaccgtcgatccggaccgccacatcgagcgggtcaccgagctgcaagaactcttcctcacgcgcgtcgggctcgacatcggcaaggtgtgggtcgcggacgacggcgccgcggtggcggtctggaccacgccggagagcgtcgaagcgggggcggtgttcgccgagatcggcccgcgcatggccgagttgagcggttcccggctggccgcgcagcaacagatggaaggcctcctggcgccgcaccggcccaaggagcccgcgtggttcctggccaccgtcggcgtctcgcccgaccaccagggcaagggtctgggcagcgccgtcgtgctccccggagtggaggcggccgagcgcgccggggtgcccgccttcctggagacctccgcgccccgcaacctccccttctacgagcggctcggcttcaccgtcaccgccgacgtcgaggtgcccgaaggaccgcgcacctggtgcatgacccgcaagcccggtgcctgatctagagggcccgtttaaacccgctgatcagcctcgactgtgccttctagttgccagccatctgttgtttgcccctcccccgtgccttccttgaccctggaaggtgccactcccactgtcctttcctaataaaatgaggaaattgcatcgcattgtctgagtaggtgtcattctattctggggggtggggtggggcaggacagcaagggggaggattgggaagacaatagcaggcatgctggggatgcggtgggctctatggtcactcgagtttactccctatcagtgatagagaacgtatgaagagtttactccctatcagtgatagagaacgtatgcagactttactccctatcagtgatagagaacgtataaggagtttactccctatcagtgatagagaacgtatgaccagtttactccctatcagtgatagagaacgtatctacagtttactccctatcagtgatagagaacgtatatccagtttactccctatcagtgatagagaacgtatgtcgaggtaggcgtgtacggtgggcgcctataaaagcagagctcgtttagtgaaccgtcagatcgcctggagcaattccacaacacttttgtcttatacttactagtgccaccatgttacaggcgtgcaaaatggaagggtttcccctcgtcccccctccatcagaagacctggtgccctatgacacggatctataccaacgccaaacgcacgagtattacccctatctcagcagtgatggggagagccatagcgaccattactgggacttccacccccaccacgtgcacagcgagttcgagagcttcgccgagaacaacttcacggagctccagagcgtgcagcccccgcagctgcagcagctctaccgccacatggagctggagcagatgcacgtcctcgatacccccatggtgccaccccatcccagtcttggccaccaggtctcctacctgccccggatgtgcctccagtacccatccctgtccccagcccagcccagctcagatgaggaggagggcgagcggcagagccccccactggaggtgtctgacggcgaggcggatggcctggagcccgggcctgggctcctgcctggggagacaggcagcaagaagaagatccgcctgtaccagttcctgttggacctgctccgcagcggcgacatgaaggacagcatctggtgggtggacaaggacaagggcaccttccagttctcgtccaagcacaaggaggcgctggcgcaccgctggggcatccagaagggcaaccgcaagaagatgacctaccagaagatggcgcgcgcgctgcgcaactacggcaagacgggcgaggtcaagaaggtgaagaagaagctcacctaccagttcagcggcgaagtgctgggccgcgggggcctggccgagcggcgccacccgccccacggatcgggagagggcaggggaagtcttctaacatgcggggacgtggaggaaaatcccggccccatgtcgcggaggaagcaagcgaagcctcaacatttccaatccgaccccgaagtggcctcgctcccccggcgagatggagacacagaaaagggtcaaccgagtcgccctactaagagcaaggatgcccacgtctgtggccggtgctgtgccgagttctttgaattatcagatcttctgctccacaagaagaactgtactaaaaatcaattagttttaatcgtaaatgaaaatccagcctccccacccgaaaccttctcccccagcccccctcctgataatcctgatgaacaaatgaatgacacagttaacaaaacagatcaagtggactgcagcgacctttcagaacacaacggacttgacagggaagagtccatggaggtggaggccccggttgctaacaaaagcggcagcggcacttccagcggcagccacagcagtaccgccccaagcagcagcagcagcagcagcagcagcagcggcggcggcggcagctcctccacaggtacctcagcgatcacaacctctctacctcaactcggggacctgacaacactgggcaacttctccgtaatcaacagcaacgtcatcatcgagaacctccagagcaccaaggtggcggtggcccagttctcccaggaagcgaggtgcggcggggcctctgggggcaagctggccgtcccagccctcatggaacaactcctagctctgcagcagcagcagatccaccagctgcaattgatcgaacagattcgtcaccaaatattgctgttggcttctcagaatgcagacttgccaacatcttctagtccttctcaaggtactttacgaacatctgccaaccccttgtccacgctaagttcccatttatctcagcagctggcagcagcagctggattggcacagagcctcgccagccaatctgccagcattagtggtgtgaaacagctacccccaatccagctacctcagagcagttctggcaacaccatcattccatccaacagcggctcttctcccaatatgaacatattggcagcggcagttaccaccccgtcctctgaaaaagtggcttcaagtgctggggcctcccatgtcagcaacccagcggtctcatcatcgtcctcaccagcttttgcaataagcagtttattaagtcctgcgtctaatccacttctacctcagcaagcctccgctaactcggttttccccagccctttgcccaacatcggaacaactgcagaggatttaaactccttgtctgccttggcccagcaaagaaaaagcaagccaccaaatgtcactgcctttgaagcgaaaagtacttccgatgaggcattcttcaaacacaagtgcaggttctgcgcgaaggtctttgggagtgacagtgccttgcagatccacttgcgttcccataccggagagaggccattcaagtgcaacatctgcgggaacaggttctccaccaaggggaatctgaaagtccactttcagcgccacaaagagaaataccctcatatccagatgaacccctatcctgtgcctgagcatttggacaatatccccacgagtactggcatcccatatggcatgtccatccctccagagaagccagtcaccagctggctagacaccaaaccagtcctgcctactctgaccacttcagtcggcctgccgttgcccccaaccctcccaagcctcatacccttcatcaagacggaagagccagcccccatccccatcagccattctgccaccagccccccaggctcagtcaaaagtgactccgggggccctgagtcagccacaagaaacctaggtgggctcccagaggaagccgaagggtccactctgccaccctctggtggcaaaagcgaagagagtggcatggtcaccaactcagtcccgacggcgagcagtagcgtcctgagctccccagcggcagactgcggccccgcgggcagtgccaccaccttcaccaaccctttgttgccgctcatgtccgagcagttcaaggccaagtttccttttgggggactcctggactcagctcaggcatcagagacgtccaagcttcagcaactggtagaaaacattgacaagaaggccactgaccccaatgagtgcatcatctgccaccgggttctcagctgccagagcgccttgaaaatgcactacaggacacacactggggagaggccctttaagtgtaagatctgtggccgggctttcaccacgaaagggaatcttaaaacccactacagtgtccatcgtgctatgcccccgctcagagtccagcattcctgccccatctgccagaagaagttcacgaacgctgtggtcctgcagcagcacatccgaatgcatatgggaggccagatccccaacaccccagtccccgacagctactctgagtccatggagtctgacacaggttcctttgatgagaaaaattttgatgacctagacaacttctctgatgaaaacatggaagactgtcctgagggcagcatccctgatacacctaagtctgcagacgcctcccaagacagcttatcctcttcgcctttgcccctcgagatgtcgagcatcgctgctttggaaaatcagatgaagatgatcaatgctggcctggcagagcagctacaggccagcctgaagtcagtggagaatgggtccatcgagggggatgtcctgaccaatgattcatcctcagtgggtggtgacatggaaagccaaagtgctggcagcccagccatctcagagtctacctcttccatgcaggctctgtccccgtccaacagcacgcaggagttccacaagtcacccagcattgaggagaaaccacagagagcggtcccaagcgagtttgccaatggtttgtctcccaccccagtgaatggtggggctttggatttgacatctagtcacgcagagaaaatcatcaaagaagattctttggggatcctcttcccttttagagaccggggtaaatttaaaaacactgcttgtgacatttgtggcaaaacatttgcttgtcagagtgccttggacattcactatagaagtcataccaaagagagaccatttatttgcacagtttgcaatcgtggcttttccacaaagggtaatttgaagcagcacatgttgacacatcagatgcgagatctgccatcccagctctttgagcccagttccaaccttggccccaatcagaactcagcggtgattcccgccaactcgttgtcatctctcatcaagacagaggtcaacggcttcgtgcatgtttctcctcaggacagtaaggacacccccaccagtcacgtcccgtctgggcctctgtcttcctctgccacatccccagttctgctccctgctctgcccaggagaactcccaagcagcactactgcaacacatgtggcaaaaccttctcctcatcgagtgccctgcagattcacgagagaactcacactggagagaaaccctttgcttgcactatttgtggaagagctttcacgactaaaggcaatcttaaggtacacatgggcactcacatgtggaatagcacccctgcacgacggggtcggcggctctctgtggatggccccatgacatttctaggaggcaatcccgtcaagttcccagaaatgttccagaaggatttggcggcaagatcaggaagtggggatccttccagcttctggaatcagtatgcagcagcgctctccaacgggctggcgatgaaggccaacgagatctccgtcattcagaacggtggcatccctccaattcctggaagcctcggcagtgggaacagctcacctgttagtgggctgacgggaaacctggagaggctccagaactcagagcccaatgctcccctggccggcctggagaaaatggcaagcagtgagaacggaaccaacttccgcttcacccgcttcgtggaggacagcaaggagatcgtcacgagttaagaattcgagctcggtacccggggatcctctagtcagctgacgcgtgctagcgcggccgcatcgataagcttgtcgacgatatctctagaggatcataatcagccataccacatttgtagaggttttacttgctttaaaaaacctcccacacctccccctgaacctgaaacataaaatgaatgcaattgttgttgttaacttgtttattgcagcttataatggttacaaataaagcaatagcatcacaaatttcacaaataaagcatttttttcactgccttgacagtactcttaagtcgacttactagggacaggattggtgacagaaaagccccatccttaggcctcctccttcctagtctcctgatattgggtctaacccccacctcctgttaggcagattccttatctggtgacacacccccatttcctggagccatctctctccttgccagaacctctaaggtttgcttacgatggagccagagaggatcctgggagggagagcttggcagggggtgggagggaagggggggatgcgtgacctgcccggttctcagtggccaccctgcgctaccctctcccagaacctgagctgctctgacgcggctgtctggtgcgtttcactgatcctggtgctgcagcttccttacacttcccaagaggagaagcagtttggaaaaacaaaatcagaataagttggtcctgagttctaactttggctcttcacctttctagtccccaatttatattgttcctccgtgcgtcagttttacctgtgagataaggccagtagccagccccgtcctggcagggctgtggtgaggaggggggtgtccgtgtggaaaactccctttgtgagaatggtgcgtcctaggtgttcaccaggtcgtggccgcctctactccctttctctttctccatccttctttccttaaagagtccccagtgctatctgggacatattcctccgcccagagcagggtcccgcttccctaaggccctgctctgggcttctgggtttgagtccttggcaagcccaggagaggcgctcaggcttccctgtcccccttcctcgtccaccatctcatgcccctggctctcctgccccttccctacaggggttcctggctctgctctaagcttggcgtaatcatggtcatagctgtttcctgtgtgaaattgttatccgctcacaattccacacaacatacgagccggaagcataaagtgtaaagcctggggtgcctaatgagtgagctaactcacattaattgcgttgcgctcactgcccgctttccagtcgggaaacctgtcgtgccagctgcattaatgaatcggccaacgcgcggggagaggcggtttgcgtattgggcgctcttccgcttcctcgctcactgactcgctgcgctcggtcgttcggctgcggcgagcggtatcagctcactcaaaggcggtaatacggttatccacagaatcaggggataacgcaggaaagaacatgtgagcaaaaggccagcaaaaggccaggaaccgtaaaaaggccgcgttgctggcgtttttccataggctccgcccccctgacgagcatcacaaaaatcgacgctcaagtcagaggtggcgaaacccgacaggactataaagataccaggcgtttccccctggaagctccctcgtgcgctctcctgttccgaccctgccgcttaccggatacctgtccgcctttctcccttcgggaagcgtggcgctttctcatagctcacgctgtaggtatctcagttcggtgtaggtcgttcgctccaagctgggctgtgtgcacgaaccccccgttcagcccgaccgctgcgccttatccggtaactatcgtcttgagtccaacccggtaagacacgacttatcgccactggcagcagccactggtaacaggattagcagagcgaggtatgtaggcggtgctacagagttcttgaagtggtggcctaactacggctacactagaagaacagtatttggtatctgcgctctgctgaagccagttaccttcggaaaaagagttggtagctcttgatccggcaaacaaaccaccgctggtagcggtggtttttttgtttgcaagcagcagattacgcgcagaaaaaaaggatctcaagaagatcctttgatcttttctacggggtctgacgctcagtggaacgaaaactcacgttaagggattttggtcatgagattatcaaaaaggatcttcacctagatccttttaaattaaaaatgaagttttaaatcaatctaaagtatatatgagtaaacttggtctgacagttaccaatgcttaatcagtgaggcacctatctcagcgatctgtctatttcgttcatccatagttgcctgactccccgtcgtgtagataactacgatacgggagggcttaccatctggccccagtgctgcaatgataccgcgagacccacgctcaccggctccagatttatcagcaataaaccagccagccggaagggccgagcgcagaagtggtcctgcaactttatccgcctccatccagtctattaattgttgccgggaagctagagtaagtagttcgccagttaatagtttgcgcaacgttgttgccattgctacaggcatcgtggtgtcacgctcgtcgtttggtatggcttcattcagctccggttcccaacgatcaaggcgagttacatgatcccccatgttgtgcaaaaaagcggttagctccttcggtcctccgatcgttgtcagaagtaagttggccgcagtgttatcactcatggttatggcagcactgcataattctcttactgtcatgccatccgtaagatgcttttctgtgactggtgagtactcaaccaagtcattctgagaatagtgtatgcggcgaccgagttgctcttgcccggcgtcaatacgggataataccgcgccacatagca

SEQ ID NO: 66 - DNA, 8508 bp, synthetic construct
  source 1..8508: mol_type = other DNA; note = ROSA26-guide A_Cas9n
gagggcctatttcccatgattccttcatatttgcatatacgatacaaggctgttagagagataattggaattaatttgactgtaaacacaaagatattagtacaaaatacgtgacgtagaaagtaataatttcttgggtagtttgcagttttaaaattatgttttaaaatggactatcatatgcttaccgtaacttgaaagtatttcgatttcttggctttatatatcttgtggaaaggacgaaacaccgtcgagtcgcttctcgattagttttagagctagaaatagcaagttaaaataaggctagtccgttatcaacttgaaaaagtggcaccgagtcggtgcttttttgttttagagctagaaatagcaagttaaaataaggctagtccgtttttagcgcgtgcgccaattctgcagacaaatggctctagaggtacccgttacataacttacggtaaatggcccgcctggctgaccgcccaacgacccccgcccattgacgtcaatagtaacgccaatagggactttccattgacgtcaatgggtggagtatttacggtaaactgcccacttggcagtacatcaagtgtatcatatgccaagtacgccccctattgacgtcaatgacggtaaatggcccgcctggcattgtgcccagtacatgaccttatgggactttcctacttggcagtacatctacgtattagtcatcgctattaccatggtcgaggtgagccccacgttctgcttcactctccccatctcccccccctccccacccccaattttgtatttatttattttttaattattttgtgcagcgatgggggcggggggggggggggggcgcgcgccaggcggggcggggcggggcgaggggcggggcggggcgaggcggagaggtgcggcggcagccaatcagagcggcgcgctccgaaagtttccttttatggcgaggcggcggcggcggcggccctataaaaagcgaagcgcgcggcgggcgggagtcgctgcgacgctgccttcgccccgtgccccgctccgccgccgcctcgcgccgcccgccccggctctgactgaccgcgttactcccacaggtgagcgggcgggacggcccttctcctccgggctgtaattagctgagcaagaggtaagggtttaagggatggttggttggtggggtattaatgtttaattacctggagcacctgcctgaaatcactttttttcaggttggaccggtgccaccatggactataaggaccacgacggagactacaaggatcatgatattgattacaaagacgatgacgataagatggccccaaagaagaagcggaaggtcggtatccacggagtcccagcagccgacaagaagtacagcatcggcctggccatcggcaccaactctgtgggctgggccgtgatcaccgacgagtacaaggtgcccagcaagaaattcaaggtgctgggcaacaccgaccggcacagcatcaagaagaacctgatcggagccctgctgttcgacagcggcgaaacagccgaggccacccggctgaagagaaccgccagaagaagatacaccagacggaagaaccggatctgctatctgcaagagatcttcagcaacgagatggccaaggtggacgacagcttcttccacagactggaagagtccttcctggtggaagaggataagaagcacgagcggcaccccatcttcggcaacatcgtggacgaggtggcctaccacgagaagtaccccaccatctaccacctgagaaagaaactggtggacagcaccgacaaggccgacctgcggctgatctatctggccctggcccacatgatcaagttccggggccacttcctgatcgagggcgacctgaaccccgacaacagcgacgtggacaagctgttcatccagctggtgcagacctacaaccagctgttcgaggaaaaccccatcaacgccagcggcgtggacgccaaggccatcctgtctgccagactgagcaagagcagacggctggaaaatctgatcgcccagctgcccggcgagaagaagaatggcctgttcggcaacctgattgccctgagcctgggcctgacccccaacttcaagagcaacttcgacctggccgaggatgccaaactgcagctgagcaaggacacctacgacgacgacctggacaacctgctggcccagatcggcgaccagtacgccgacctgtttctggccgccaagaacctgtccgacgccatcctgctgagcgacatcctgagagtgaacaccgagatcaccaaggcccccctgagcgcctctatgatcaagagatacgacgagcaccaccaggacctgaccctgctgaaagctctcgtgcggcagcagctgcctgagaagtacaaagagattttcttcgaccagagcaagaacggctacgccggctacattgacggcggagccagccaggaagagttctacaagttcatcaagcccatcctggaaaagatggacggcaccgaggaactgctcgtgaagctgaacagagaggacctgctgcggaagcagcggaccttcgacaacggcagcatcccccaccagatccacctgggagagctgcacgccattctgcggcggcaggaagatttttacccattcctgaaggacaaccgggaaaagatcgagaagatcctgaccttccgcatcccctactacgtgggccctctggccaggggaaacagcagattcgcctggatgaccagaaagagcgaggaaaccatcaccccctggaacttcgaggaagtggtggacaagggcgcttccgcccagagcttcatcgagcggatgaccaacttcgataagaacctgcccaacgagaaggtgctgcccaagcacagcctgctgtacgagtacttcaccgtgtataacgagctgaccaaagtgaaatacgtgaccgagggaatgagaaagcccgccttcctgagcggcgagcagaaaaaggccatcgtggacctgctgttcaagaccaaccggaaagtgaccgtgaagcagctgaaagaggactacttcaagaaaatcgagtgcttcgactccgtggaaatctccggcgtggaagatcggttcaacgcctccctgggcacataccacgatctgctgaaaattatcaaggacaaggacttcctggacaatgaggaaaacgaggacattctggaagatatcgtgctgaccctgacactgtttgaggacagagagatgatcgaggaacggctgaaaacctatgcccacctgttcgacgacaaagtgatgaagcagctgaagcggcggagatacaccggctggggcaggctgagccggaagctgatcaacggcatccgggacaagcagtccggcaagacaatcctggatttcctgaagtccgacggcttcgccaacagaaacttcatgcagctgatccacgacgacagcctgacctttaaagaggacatccagaaagcccaggtgtccggccagggcgatagcctgcacgagcacattgccaatctggccggcagccccgccattaagaagggcatcctgcagacagtgaaggtggtggacgagctcgtgaaagtgatgggccggcacaagcccgagaacatcgtgatcgaaatggccagagagaaccagaccacccagaagggacagaagaacagccgcgagagaatgaagcggatcgaagagggcatcaaagagctgggcagccagatcctgaaagaacaccccgtggaaaacacccagctgcagaacgagaagctgtacctgtactacctgcagaatgggcgggatatgtacgtggaccaggaactggacatcaaccggctgtccgactacgatgtggaccatatcgtgcctcagagctttctgaaggacgactccatcgacaacaaggtgctgaccagaagcgacaagaaccggggcaagagcgacaacgtgccctccgaagaggtcgtgaagaagatgaagaactactggcggcagctgctgaacgccaagctgattacccagagaaagttcgacaatctgaccaaggccgagagaggcggcctgagcgaactggataaggccggcttcatcaagagacagctggtggaaacccggcagatcacaaagcacgtggcacagatcctggactcccggatgaacactaagtacgacgagaatgacaagctgatccgggaagtgaaagtgatcaccctgaagtccaagctggtgtccgatttccggaaggatttccagttttacaaagtgcgcgagatcaacaactaccaccacgcccacgacgcctacctgaacgccgtcgtgggaaccgccctgatcaaaaagtaccctaagctggaaagcgagttcgtgtacggcgactacaaggtgtacgacgtgcggaagatgatcgccaagagcgagcaggaaatcggcaaggctaccgccaagtacttcttctacagcaacatcatgaactttttcaagaccgagattaccctggccaacggcgagatccggaagcggcctctgatcgagacaaacggcgaaaccggggagatcgtgtgggataagggccgggattttgccaccgtgcggaaagtgctgagcatgccccaagtgaatatcgtgaaaaagaccgaggtgcagacaggcggcttcagcaaagagtctatcctgcccaagaggaacagcgataagctgatcgccagaaagaaggactgggaccctaagaagtacggcggcttcgacagccccaccgtggcctattctgtgctggtggtggccaaagtggaaaagggcaagtccaagaaactgaagagtgtgaaagagctgctggggatcaccatcatggaaagaagcagcttcgagaagaatcccatcgactttctggaagccaagggctacaaagaagtgaaaaaggacctgatcatcaagctgcctaagtactccctgttcgagctggaaaacggccggaagagaatgctggcctctgccggcgaactgcagaagggaaacgaactggccctgccctccaaatatgtgaacttcctgtacctggccagccactatgagaagctgaagggctcccccgaggataatgagcagaaacagctgtttgtggaacagcacaagcactacctggacgagatcatcgagcagatcagcgagttctccaagagagtgatcctggccgacgctaatctggacaaagtgctgtccgcctacaacaagcaccgggataagcccatcagagagcaggccgagaatatcatccacctgtttaccctgaccaatctgggagcccctgccgccttcaagtactttgacaccaccatcgaccggaagaggtacaccagcaccaaagaggtgctggacgccaccctgatccaccagagcatcaccggcctgtacgagacacggatcgacctgtctcagctgggaggcgacaaaaggccggcggccacgaaaaaggccggccaggcaaaaaagaaaaagtaagaattcctagagctcgctgatcagcctcgactgtgccttctagttgccagccatctgttgtttgcccctcccccgtgccttccttgaccctggaaggtgccactcccactgtcctttcctaataaaatgaggaaattgcatcgcattgtctgagtaggtgtcattctattctggggggtggggtggggcaggacagcaagggggaggattgggaagagaatagcaggcatgctggggagcggccgcaggaacccctagtgatggagttggccactccctctctgcgcgctcgctcgctcactgaggccgggcgaccaaaggtcgcccgacgcccgggctttgcccgggcggcctcagtgagcgagcgagcgcgcagctgcctgcaggggcgcctgatgcggtattttctccttacgcatctgtgcggtatttcacaccgcatacgtcaaagcaaccatagtacgcgccctgtagcggcgcattaagcgcggcgggtgtggtggttacgcgcagcgtgaccgctacacttgccagcgccctagcgcccgctcctttcgctttcttcccttcctttctcgccacgttcgccggctttccccgtcaagctctaaatcgggggctccctttagggttccgatttagtgctttacggcacctcgaccccaaaaaacttgatttgggtgatggttcacgtagtgggccatcgccctgatagacggtttttcgccctttgacgttggagtccacgttctttaatagtggactcttgttccaaactggaacaacactcaaccctatctcgggctattcttttgatttataagggattttgccgatttcggcctattggttaaaaaatgagctgatttaacaaaaatttaacgcgaattttaacaaaatattaacgtttacaattttatggtgcactctcagtacaatctgctctgatgccgcatagttaagccagccccgacacccgccaacacccgctgacgcgccctgacgggcttgtctgctcccggcatccgcttacagacaagctgtgaccgtctccgggagctgcatgtgtcagaggttttcaccgtcatcaccgaaacgcgcgagacgaaagggcctcgtgatacgcctatttttataggttaatgtcatgataataatggtttcttagacgtcaggtggcacttttcggggaaatgtgcgcggaacccctatttgtttatttttctaaatacattcaaatatgtatccgctcatgagacaataaccctgataaatgcttcaataatattgaaaaaggaagagtatgagtattcaacatttccgtgtcgcccttattcccttttttgcggcattttgccttcctgtttttgctcacccagaaacgctggtgaaagtaaaagatgctgaagatcagttgggtgcacgagtgggttacatcgaactggatctcaacagcggtaagatccttgagagttttcgccccgaagaacgttttccaatgatgagcacttttaaagttctgctatgtggcgcggtattatcccgtattgacgccgggcaagagcaactcggtcgccgcatacactattctcagaatgacttggttgagtactcaccagtcacagaaaagcatcttacggatggcatgacagtaagagaattatgcagtgctgccataaccatgagtgataacactgcggccaacttacttctgacaacgatcggaggaccgaaggagctaaccgcttttttgcacaacatgggggatcatgtaactcgccttgatcgttgggaaccggagctgaatgaagccataccaaacgacgagcgtgacaccacgatgcctgtagcaatggcaacaacgttgcgcaaactattaactggcgaactacttactctagcttcccggcaacaattaatagactggatggaggcggataaagttgcaggaccacttctgcgctcggcccttccggctggctggtttattgctgataaatctggagccggtgagcgtggaagccgcggtatcattgcagcactggggccagatggtaagccctcccgtatcgtagttatctacacgacggggagtcaggcaactatggatgaacgaaatagacagatcgctgagataggtgcctcactgattaagcattggtaactgtcagaccaagtttactcatatatactttagattgatttaaaacttcatttttaatttaaaaggatctaggtgaagatcctttttgataatctcatgaccaaaatcccttaacgtgagttttcgttccactgagcgtcagaccccgtagaaaagatcaaaggatcttcttgagatcctttttttctgcgcgtaatctgctgcttgcaaacaaaaaaaccaccgctaccagcggtggtttgtttgccggatcaagagctaccaactctttttccgaaggtaactggcttcagcagagcgcagataccaaatactgtccttctagtgtagccgtagttaggccaccacttcaagaactctgtagcaccgcctacatacctcgctctgctaatcctgttaccagtggctgctgccagtggcgataagtcgtgtcttaccgggttggactcaagacgatagttaccggataaggcgcagcggtcgggctgaacggggggttcgtgcacacagcccagcttggagcgaacgacctacaccgaactgagatacctacagcgtgagctatgagaaagcgccacgcttcccgaagggagaaaggcggacaggtatccggtaagcggcagggtcggaacaggagagcgcacgagggagcttccagggggaaacgcctggtatctttatagtcctgtcgggtttcgccacctctgacttgagcgtcgatttttgtgatgctcgtcaggggggcggagcctatggaaaaacgccagcaacgcggcctttttacggttcctggccttttgctggccttttgctcacatgt

SEQ ID NO: 67 - DNA, 8508 bp, synthetic construct
  source 1..8508: mol_type = other DNA; note = ROSA26-guide B_Cas9n
gagggcctatttcccatgattccttcatatttgcatatacgatacaaggctgttagagagataattggaattaatttgactgtaaacacaaagatattagtacaaaatacgtgacgtagaaagtaataatttcttgggtagtttgcagttttaaaattatgttttaaaatggactatcatatgcttaccgtaacttgaaagtatttcgatttcttggctttatatatcttgtggaaaggacgaaacaccggcgatgacgagatcacgcggttttagagctagaaatagcaagttaaaataaggctagtccgttatcaacttgaaaaagtggcaccgagtcggtgcttttttgttttagagctagaaatagcaagttaaaataaggctagtccgtttttagcgcgtgcgccaattctgcagacaaatggctctagaggtacccgttacataacttacggtaaatggcccgcctggctgaccgcccaacgacccccgcccattgacgtcaatagtaacgccaatagggactttccattgacgtcaatgggtggagtatttacggtaaactgcccacttggcagtacatcaagtgtatcatatgccaagtacgccccctattgacgtcaatgacggtaaatggcccgcctggcattgtgcccagtacatgaccttatgggactttcctacttggcagtacatctacgtattagtcatcgctattaccatggtcgaggtgagccccacgttctgcttcactctccccatctcccccccctccccacccccaattttgtatttatttattttttaattattttgtgcagcgatgggggcggggggggggggggggcgcgcgccaggcggggcggggcggggcgaggggcggggcggggcgaggcggagaggtgcggcggcagccaatcagagcggcgcgctccgaaagtttccttttatggcgaggcggcggcggcggcggccctataaaaagcgaagcgcgcggcgggcgggagtcgctgcgacgctgccttcgccccgtgccccgctccgccgccgcctcgcgccgcccgccccggctctgactgaccgcgttactcccacaggtgagcgggcgggacggcccttctcctccgggctgtaattagctgagcaagaggtaagggtttaagggatggttggttggtggggtattaatgtttaattacctggagcacctgcctgaaatcactttttttcaggttggaccggtgccaccatggactataaggaccacgacggagactacaaggatcatgatattgattacaaagacgatgacgataagatggccccaaagaagaagcggaaggtcggtatccacggagtcccagcagccgacaagaagtacagcatcggcctggccatcggcaccaactctgtgggctgggccgtgatcaccgacgagtacaaggtgcccagcaagaaattcaaggtgctgggcaacaccgaccggcacagcatcaagaagaacctgatcggagccctgctgttcgacagcggcgaaacagccgaggccacccggctgaagagaaccgccagaagaagatacaccagacggaagaaccggatctgctatctgcaagagatcttcagcaacgagatggccaaggtggacgacagcttcttccacagactggaagagtccttcctggtggaagaggataagaagcacgagcggcaccccatcttcggcaacatcgtggacgaggtggcctaccacgagaagtaccccaccatctaccacctgagaaagaaactggtggacagcaccgacaaggccgacctgcggctgatctatctggccctggcccacatgatcaagttccggggccacttcctgatcgagggcgacctgaaccccgacaacagcgacgtggacaagctgttcatccagctggtgcagacctacaaccagctgttcgaggaaaaccccatcaacgccagcggcgtggacgccaaggccatcctgtctgccagactgagcaagagcagacggctggaaaatctgatcgcccagctgcccggcgagaagaagaatggcctgttcggcaacctgattgccctgagcctgggcctgacccccaacttcaagagcaacttcgacctggccgaggatgccaaactgcagctgagcaaggacacctacgacgacgacctggacaacctgctggcccagatcggcgaccagtacgccgacctgtttctggccgccaagaacctgtccgacgccatcctgctgagcgacatcctgagagtgaacaccgagatcaccaaggcccccctgagcgcctctatgatcaagagatacgacgagcaccaccaggacctgaccctgctgaaagctctcgtgcggcagcagctgcctgagaagtacaaagagattttcttcgaccagagcaagaacggctacgccggctacattgacggcggagccagccaggaagagttctacaagttcatcaagcccatcctggaaaagatggacggcaccgaggaactgctcgtgaagctgaacagagaggacctgctgcggaagcagcggaccttcgacaacggcagcatcccccaccagatccacctgggagagctgcacgccattctgcggcggcaggaagatttttacccattcctgaaggacaaccgggaaaagatcgagaagatcctgaccttccgcatcccctactacgtgggccctctggccaggggaaacagcagattcgcctggatgaccagaaagagcgaggaaaccatcaccccctggaacttcgaggaagtggtggacaagggcgcttccgcccagagcttcatcgagcggatgaccaacttcgataagaacctgcccaacgagaaggtgctgcccaagcacagcctgctgtacgagtacttcaccgtgtataacgagctgaccaaagtgaaatacgtgaccgagggaatgagaaagcccgccttcctgagcggcgagcagaaaaaggccatcgtggacctgctgttcaagaccaaccggaaagtgaccgtgaagcagctgaaagaggactacttcaagaaaatcgagtgcttcgactccgtggaaatctccggcgtggaagatcggttcaacgcctccctgggcacataccacgatctgctgaaaattatcaaggacaaggacttcctggacaatgaggaaaacgaggacattctggaagatatcgtgctgaccctgacactgtttgaggacagagagatgatcgaggaacggctgaaaacctatgcccacctgttcgacgacaaagtgatgaagcagctgaagcggcggagatacaccggctggggcaggctgagccggaagctgatcaacggcatccgggacaagcagtccggcaagacaatcctggatttcctgaagtccgacggcttcgccaacagaaacttcatgcagctgatccacgacgacagcctgacctttaaagaggacatccagaaagcccaggtgtccggccagggcgatagcctgcacgagcacattgccaatctggccggcagccccgccattaagaagggcatcctgcagacagtgaaggtggtggacgagctcgtgaaagtgatgggccggcacaagcccgagaacatcgtgatcgaaatggccagagagaaccagaccacccagaagggacagaagaacagccgcgagagaatgaagcggatcgaagagggcatcaaagagctgggcagccagatcctgaaagaacaccccgtggaaaacacccagctgcagaacgagaagctgtacctgtactacctgcagaatgggcgggatatgtacgtggaccaggaactggacatcaaccggctgtccgactacgatgtggaccatatcgtgcctcagagctttctgaaggacgactccatcgacaacaaggtgctgaccagaagcgacaagaaccggggcaagagcgacaacgtgccctccgaagaggtcgtgaagaagatgaagaactactggcggcagctgctgaacgccaagctgattacccagagaaagttcgacaatctgaccaaggccgagagaggcggcctgagcgaactggataaggccggcttcatcaagagacagctggtggaaacccggcagatcacaaagcacgtggcacagatcctggactcccggatgaacactaagtacgacgagaatgacaagctgatccgggaagtgaaagtgatcaccctgaagtccaagctggtgtccgatttccggaaggatttccagttttacaaagtgcgcgagatcaacaactaccaccacgcccacgacgcctacctgaacgccgtcgtgggaaccgccctgatcaaaaagtaccctaagctggaaagcgagttcgtgtacggcgactacaaggtgtacgacgtgcggaagatgatcgccaagagcgagcaggaaatcggcaaggctaccgccaagtacttcttctacagcaacatcatgaactttttcaagaccgagattaccctggccaacggcgagatccggaagcggcctctgatcgagacaaacggcgaaaccggggagatcgtgtgggataagggccgggattttgccaccgtgcggaaagtgctgagcatgccccaagtgaatatcgtgaaaaagaccgaggtgcagacaggcggcttcagcaaagagtctatcctgcccaagaggaacagcgataagctgatcgccagaaagaaggactgggaccctaagaagtacggcggcttcgacagccccaccgtggcctattctgtgctggtggtggccaaagtggaaaagggcaagtccaagaaactgaagagtgtgaaagagctgctggggatcaccatcatggaaagaagcagcttcgagaagaatcccatcgactttctggaagccaagggctacaaagaagtgaaaaaggacctgatcatcaagctgcctaagtactccctgttcgagctggaaaacggccggaagagaatgctggcctctgccggcgaactgcagaagggaaacgaactggccctgccctccaaatatgtgaacttcctgtacctggccagccactatgagaagctgaagggctcccccgaggataatgagcagaaacagctgtttgtggaacagcacaagcactacctggacgagatcatcgagcagatcagcgagttctccaagagagtgatcctggccgacgctaatctggacaaagtgctgtccgcctacaacaagcaccgggataagcccatcagagagcaggccgagaatatcatccacctgtttaccctgaccaatctgggagcccctgccgccttcaagtactttgacaccaccatcgaccggaagaggtacaccagcaccaaagaggtgctggacgccaccctgatccaccagagcatcaccggcctgtacgagacacggatcgacctgtctcagctgggaggcgacaaaaggccggcggccacgaaaaaggccggccaggcaaaaaagaaaaagtaagaattcctagagctcgctgatcagcctcgactgtgccttctagttgccagccatctgttgtttgcccctcccccgtgccttccttgaccctggaaggtgccactcccactgtcctttcctaataaaatgaggaaattgcatcgcattgtctgagtaggtgtcattctattctggggggtggggtggggcaggacagcaagggggaggattgggaagagaatagcaggcatgctggggagcggccgcaggaacccctagtgatggagttggccactccctctctgcgcgctcgctcgctcactgaggccgggcgaccaaaggtcgcccgacgcccgggctttgcccgggcggcctcagtgagcgagcgagcgcgcagctgcctgcaggggcgcctgatgcggtattttctccttacgcatctgtgcggtatttcacaccgcatacgtcaaagcaaccatagtacgcgccctgtagcggcgcattaagcgcggcgggtgtggtggttacgcgcagcgtgaccgctacacttgccagcgccctagcgcccgctcctttcgctttcttcccttcctttctcgccacgttcgccggctttccccgtcaagctctaaatcgggggctccctttagggttccgatttagtgctttacggcacctcgaccccaaaaaacttgatttgggtgatggttcacgtagtgggccatcgccctgatagacggtttttcgccctttgacgttggagtccacgttctttaatagtggactcttgttccaaactggaacaacactcaaccctatctcgggctattcttttgatttataagggattttgccgatttcggcctattggttaaaaaatgagctgatttaacaaaaatttaacgcgaattttaacaaaatattaacgtttacaattttatggtgcactctcagtacaatctgctctgatgccgcatagttaagccagccccgacacccgccaacacccgctgacgcgccctgacgggcttgtctgctcccggcatccgcttacagacaagctgtgaccgtctccgggagctgcatgtgtcagaggttttcaccgtcatcaccgaaacgcgcgagacgaaagggcctcgtgatacgcctatttttataggttaatgtcatgataataatggtttcttagacgtcaggtggcacttttcggggaaatgtgcgcggaacccctatttgtttatttttctaaatacattcaaatatgtatccgctcatgagacaataaccctgataaatgcttcaataatattgaaaaaggaagagtatgagtattcaacatttccgtgtcgcccttattcccttttttgcggcattttgccttcctgtttttgctcacccagaaacgctggtgaaagtaaaagatgctgaagatcagttgggtgcacgagtgggttacatcgaactggatctcaacagcggtaagatccttgagagttttcgccccgaagaacgttttccaatgatgagcacttttaaagttctgctatgtggcgcggtattatcccgtattgacgccgggcaagagcaactcggtcgccgcatacactattctcagaatgacttggttgagtactcaccagtcacagaaaagcatcttacggatggcatgacagtaagagaattatgcagtgctgccataaccatgagtgataacactgcggccaacttacttctgacaacgatcggaggaccgaaggagctaaccgcttttttgcacaacatgggggatcatgtaactcgccttgatcgttgggaaccggagctgaatgaagccataccaaacgacgagcgtgacaccacgatgcctgtagcaatggcaacaacgttgcgcaaactattaactggcgaactacttactctagcttcccggcaacaattaatagactggatggaggcggataaagttgcaggaccacttctgcgctcggcccttccggctggctggtttattgctgataaatctggagccggtgagcgtggaagccgcggtatcattgcagcactggggccagatggtaagccctcccgtatcgtagttatctacacgacggggagtcaggcaactatggatgaacgaaatagacagatcgctgagataggtgcctcactgattaagcattggtaactgtcagaccaagtttactcatatatactttagattgatttaaaacttcatttttaatttaaaaggatctaggtgaagatcctttttgataatctcatgaccaaaatcccttaacgtgagttttcgttccactgagcgtcagaccccgtagaaaagatcaaaggatcttcttgagatcctttttttctgcgcgtaatctgctgcttgcaaacaaaaaaaccaccgctaccagcggtggtttgtttgccggatcaagagctaccaactctttttccgaaggtaactggcttcagcagagcgcagataccaaatactgtccttctagtgtagccgtagttaggccaccacttcaagaactctgtagcaccgcctacatacctcgctctgctaatcctgttaccagtggctgctgccagtggcgataagtcgtgtcttaccgggttggactcaagacgatagttaccggataaggcgcagcggtcgggctgaacggggggttcgtgcacacagcccagcttggagcgaacgacctacaccgaactgagatacctacagcgtgagctatgagaaagcgccacgcttcccgaagggagaaaggcggacaggtatccggtaagcggcagggtcggaacaggagagcgcacgagggagcttccagggggaaacgcctggtatctttatagtcctgtcgggtttcgccacctctgacttgagcgtcgatttttgtgatgctcgtcaggggggcggagcctatggaaaaacgccagcaacgcggcctttttacggttcctggccttttgctggccttttgctcacatgt

SEQ ID NO: 68 - DNA, 4032 bp, synthetic construct
  source 1..4032: mol_type = other DNA; note = pZFN-AAVS1-L-ELD
gactcttcgcgatgtacgggccagatatacgcgttgacattgattattgactagttattaatagtaatcaattacggggtcattagttcatagcccatatatggagttccgcgttacataacttacggtaaatggcccgcctggctgaccgcccaacgacccccgcccattgacgtcaataatgacgtatgttcccatagtaacgccaatagggactttccattgacgtcaatgggtggactatttacggtaaactgcccacttggcagtacatcaagtgtatcatatgccaagtacgccccctattgacgtcaatgacggtaaatggcccgcctggcattatgcccagtacatgaccttatgggactttcctacttggcagtacatctacgtattagtcatcgctattaccatggtgatgcggttttggcagtacatcaatgggcgtggatagcggtttgactcacggggatttccaagtctccaccccattgacgtcaatgggagtttgttttggcaccaaaatcaacgggactttccaaaatgtcgtaacaactccgccccattgacgcaaatgggcggtaggcgtgtacggtgggaggtctatataagcagagctctctggctaactagagaacccactgcttactggcttatcgaaattaatacgactcactatagggagacccaagctggctagcgtttaaacttaagctgatccactagtccagtgtggtggaattcgccatggactacaaagaccatgacggtgattataaagatcatgacatcgattacaaggatgacgatgacaagatggcccccaagaagaagaggaaggtgggcattcacggggtacccgccgctatggccgagcggcccttccagtgccggatctgcatgcggaacttcagctacaactggcatctgcagcggcacatccggacccacaccggcgagaagcccttcgcctgcgacatctgcggccggaagttcgccagaagcgaccacctgaccacccacaccaagatccacacaggcagccagaaaccttttcagtgcagaatctgtatgagaaacttctcccacaactacgcccgggactgccacatcagaacacacacaggggagaaaccttttgcctgcgatatctgtgggcgcaaatttgcccagaacagcacccggatcgggcacacaaagattcacctgagaggatcccagctggtgaagagcgagctggaggagaagaagtccgagctgcggcacaagctgaagtacgtgccccacgagtacatcgagctgatcgagatcgccaggaacagcacccaggaccgcatcctggagatgaaggtgatggagttcttcatgaaggtgtacggctacaggggaaagcacctgggcggaagcagaaagcctgacggcgccatctatacagtgggcagccccatcgattacggcgtgatcgtggacacaaaggcctacagcggcggctacaatctgcctatcggccaggccgacgagatggagagatacgtggaggagaaccagacccgggataagcacctcaaccccaacgagtggtggaaggtgtaccctagcagcgtgaccgagttcaagttcctgttcgtgagcggccacttcaagggcaactacaaggcccagctgaccaggctgaaccacatcaccaactgcaatggcgccgtgctgagcgtggaggagctgctgatcggcggcgagatgatcaaagccggcaccctgacactggaggaggtgcggcgcaagttcaacaacggcgagatcaacttcagatcttgataactcgagtctagagggcccgtttaaacccgctgatcagcctcgactgtgccttctagttgccagccatctgttgtttgcccctcccccgtgccttccttgaccctggaaggtgccactcccactgtcctttcctaataaaatgaggaaattgcatcgcattgtctgagtaggtgtcattctattctggggggtggggtggggcaggacagcaagggggaggattgggaagacaatagcaggcatgctggggatgcggtgggctctatggcttctactgggcggttttatggacagcaagcgaaccggaattgccagctggggcgccctctggtaaggttgggaagccctgcaaagtaaactggatggctttctcgccgccaaggatctgatggcgcaggggatcaagctctgatcaagagacaggatgaggatcgtttcgcatgattgaacaagatggattgcacgcaggttctccggccgcttgggtggagaggctattcggctatgactgggcacaacagacaatcggctgctctgatgccgccgtgttccggctgtcagcgcaggggcgcccggttctttttgtcaagaccgacctgtccggtgccctgaatgaactgcaagacgaggcagcgcggctatcgtggctggccacgacgggcgttccttgcgcagctgtgctcgacgttgtcactgaagcgggaagggactggctgctattgggcgaagtgccggggcaggatctcctgtcatctcaccttgctcctgccgagaaagtatccatcatggctgatgcaatgcggcggctgcatacgcttgatccggctacctgcccattcgaccaccaagcgaaacatcgcatcgagcgagcacgtactcggatggaagccggtcttgtcgatcaggatgatctggacgaagagcatcaggggctcgcgccagccgaactgttcgccaggctcaaggcgagcatgcccgacggcgaggatctcgtcgtgacccatggcgatgcctgcttgccgaatatcatggtggaaaatggccgcttttctggattcatcgactgtggccggctgggtgtggcggaccgctatcaggacatagcgttggctacccgtgatattgctgaagagcttggcggcgaatgggctgaccgcttcctcgtgctttacggtatcgccgctcccgattcgcagcgcatcgccttctatcgccttcttgacgagttcttctgaattattaacgcttacaatttcctgatgcggtattttctccttacgcatctgtgcggtatttcacaccgcatacaggtggcacttttcggggaaatgtgcgcggaacccctatttgtttatttttctaaatacattcaaatatgtatccgctcatgagacaataaccctgataaatgcttcaataatagcacgtgctaaaacttcatttttaatttaaaaggatctaggtgaagatcctttttgataatctcatgaccaaaatcccttaacgtgagttttcgttccactgagcgtcagaccccgtagaaaagatcaaaggatcttcttgagatcctttttttctgcgcgtaatctgctgcttgcaaacaaaaaaaccaccgctaccagcggtggtttgtttgccggatcaagagctaccaactctttttccgaaggtaactggcttcagcagagcgcagataccaaatactgtccttctagtgtagccgtagttaggccaccacttcaagaactctgtagcaccgcctacatacctcgctctgctaatcctgttaccagtggctgctgccagtggcgataagtcgtgtcttaccgggttggactcaagacgatagttaccggataaggcgcagcggtcgggctgaacggggggttcgtgcacacagcccagcttggagcgaacgacctacaccgaactgagatacctacagcgtgagctatgagaaagcgccacgcttcccgaagggagaaaggcggacaggtatccggtaagcggcagggtcggaacaggagagcgcacgagggagcttccagggggaaacgcctggtatctttatagtcctgtcgggtttcgccacctctgacttgagcgtcgatttttgtgatgctcgtcaggggggcggagcctatggaaaaacgccagcaacgcggcctttttacggttcctgggcttttgctggccttttgctcacatgttctt

SEQ ID NO: 69 - DNA, 4032 bp, synthetic construct
  source 1..4032: mol_type = other DNA; note = pZFN-AAVS1-R_KKR
gactcttcgcgatgtacgggccagatatacgcgttgacattgattattgactagttattaatagtaatcaattacggggtcattagttcatagcccatatatggagttccgcgttacataacttacggtaaatggcccgcctggctgaccgcccaacgacccccgcccattgacgtcaataatgacgtatgttcccatagtaacgccaatagggactttccattgacgtcaatgggtggactatttacggtaaactgcccacttggcagtacatcaagtgtatcatatgccaagtacgccccctattgacgtcaatgacggtaaatggcccgcctggcattatgcccagtacatgaccttatgggactttcctacttggcagtacatctacgtattagtcatcgctattaccatggtgatgcggttttggcagtacatcaatgggcgtggatagcggtttgactcacggggatttccaagtctccaccccattgacgtcaatgggagtttgttttggcaccaaaatcaacgggactttccaaaatgtcgtaacaactccgccccattgacgcaaatgggcggtaggcgtgtacggtgggaggtctatataagcagagctctctggctaactagagaacccactgcttactggcttatcgaaattaatacgactcactatagggagacccaagctggctagcgtttaaacttaagctgatccactagtccagtgtggtggaattcgccatggactacaaagaccatgacggtgattataaagatcatgacatcgattacaaggatgacgatgacaagatggcccccaagaagaagaggaaggtgggcattcacggggtacccgccgctatggccgagcggcccttccagtgccggatctgcatgcggaactttagccagagcagcaacctggcccggcacatcagaacccacacaggcgagaagcccttcgcctgcgacatctgcggccggaagttcgcccggaccgactacctggtggaccacaccaagatccacaccggcagccagaaaccttttcagtgcagaatctgtatgagaaacttcagctacaacacccacctgaccagacacatccggacacacactggggagaaaccttttgcctgcgatatctgtgggagaaagtttgcccagggctacaatctggccgggcacacaaagattcacctgagaggatcccagctggtgaagagcgagctggaggagaagaagtccgagctgcggcacaagctgaagtacgtgccccacgagtacatcgagctgatcgagatcgccaggaacagcacccaggaccgcatcctggagatgaaggtgatggagttcttcatgaaggtgtacggctacaggggaaagcacctgggcggaagcagaaagcctgacggcgccatctatacagtgggcagccccatcgattacggcgtgatcgtggacacaaaggcctacagcggcggctacaatctgcctatcggccaggccgacgagatgcagagatacgtgaaggagaaccagacccggaataagcacatcaaccccaacgagtggtggaaggtgtaccctagcagcgtgaccgagttcaagttcctgttcgtgagcggccacttcaagggcaactacaaggcccagctgaccaggctgaaccgcaaaaccaactgcaatggcgccgtgctgagcgtggaggagctgctgatcggcggcgagatgatcaaagccggcaccctgacactggaggaggtgcggcgcaagttcaacaacggcgagatcaacttcagatcttgataactcgagtctagagggcccgtttaaacccgctgatcagcctcgactgtgccttctagttgccagccatctgttgtttgcccctcccccgtgccttccttgaccctggaaggtgccactcccactgtcctttcctaataaaatgaggaaattgcatcgcattgtctgagtaggtgtcattctattctggggggtggggtggggcaggacagcaagggggaggattgggaagacaatagcaggcatgctggggatgcggtgggctctatggcttctactgggcggttttatggacagcaagcgaaccggaattgccagctggggcgccctctggtaaggttgggaagccctgcaaagtaaactggatggctttctcgccgccaaggatctgatggcgcaggggatcaagctctgatcaagagacaggatgaggatcgtttcgcatgattgaacaagatggattgcacgcaggttctccggccgcttgggtggagaggctattcggctatgactgggcacaacagacaatcggctgctctgatgccgccgtgttccggctgtcagcgcaggggcgcccggttctttttgtcaagaccgacctgtccggtgccctgaatgaactgcaagacgaggcagcgcggctatcgtggctggccacgacgggcgttccttgcgcagctgtgctcgacgttgtcactgaagcgggaagggactggctgctattgggcgaagtgccggggcaggatctcctgtcatctcaccttgctcctgccgagaaagtatccatcatggctgatgcaatgcggcggctgcatacgcttgatccggctacctgcccattcgaccaccaagcgaaacatcgcatcgagcgagcacgtactcggatggaagccggtcttgtcgatcaggatgatctggacgaagagcatcaggggctcgcgccagccgaactgttcgccaggctcaaggcgagcatgcccgacggcgaggatctcgtcgtgacccatggcgatgcctgcttgccgaatatcatggtggaaaatggccgcttttctggattcatcgactgtggccggctgggtgtggcggaccgctatcaggacatagcgttggctacccgtgatattgctgaagagcttggcggcgaatgggctgaccgcttcctcgtgctttacggtatcgccgctcccgattcgcagcgcatcgccttctatcgccttcttgacgagttcttctgaattattaacgcttacaatttcctgatgcggtattttctccttacgcatctgtgcggtatttcacaccgcatacaggtggcacttttcggggaaatgtgcgcggaacccctatttgtttatttttctaaatacattcaaatatgtatccgctcatgagacaataaccctgataaatgcttcaataatagcacgtgctaaaacttcatttttaatttaaaaggatctaggtgaagatcctttttgataatctcatgaccaaaatcccttaacgtgagttttcgttccactgagcgtcagaccccgtagaaaagatcaaaggatcttcttgagatcctttttttctgcgcgtaatctgctgcttgcaaacaaaaaaaccaccgctaccagcggtggtttgtttgccggatcaagagctaccaactctttttccgaaggtaactggcttcagcagagcgcagataccaaatactgtccttctagtgtagccgtagttaggccaccacttcaagaactctgtagcaccgcctacatacctcgctctgctaatcctgttaccagtggctgctgccagtggcgataagtcgtgtcttaccgggttggactcaagacgatagttaccggataaggcgcagcggtcgggctgaacggggggttcgtgcacacagcccagcttggagcgaacgacctacaccgaactgagatacctacagcgtgagctatgagaaagcgccacgcttcccgaagggagaaaggcggacaggtatccggtaagcggcagggtcggaacaggagagcgcacgagggagcttccagggggaaacgcctggtatctttatagtcctgtcgggtttcgccacctctgacttgagcgtcgatttttgtgatgctcgtcaggggggcggagcctatggaaaaacgccagcaacgcggcctttttacggttcctgggcttttgctggccttttgctcacatgttctt

SEQ ID NO: 70 - DNA, 1068 bp, synthetic construct
  source 1..1068: mol_type = other DNA; note = AAVS1-L_ZFN
atggactacaaagaccatgacggtgattataaagatcatgacatcgattacaaggatgacgatgacaagatggcccccaagaagaagaggaaggtgggcattcacggggtacccgccgctatggccgagcggcccttccagtgccggatctgcatgcggaacttcagctacaactggcatctgcagcggcacatccggacccacaccggcgagaagcccttcgcctgcgacatctgcggccggaagttcgccagaagcgaccacctgaccacccacaccaagatccacacaggcagccagaaaccttttcagtgcagaatctgtatgagaaacttctcccacaactacgcccgggactgccacatcagaacacacacaggggagaaaccttttgcctgcgatatctgtgggcgcaaatttgcccagaacagcacccggatcgggcacacaaagattcacctgagaggatcccagctggtgaagagcgagctggaggagaagaagtccgagctgcggcacaagctgaagtacgtgccccacgagtacatcgagctgatcgagatcgccaggaacagcacccaggaccgcatcctggagatgaaggtgatggagttcttcatgaaggtgtacggctacaggggaaagcacctgggcggaagcagaaagcctgacggcgccatctatacagtgggcagccccatcgattacggcgtgatcgtggacacaaaggcctacagcggcggctacaatctgcctatcggccaggccgacgagatggagagatacgtggaggagaaccagacccgggataagcacctcaaccccaacgagtggtggaaggtgtaccctagcagcgtgaccgagttcaagttcctgttcgtgagcggccacttcaagggcaactacaaggcccagctgaccaggctgaaccacatcaccaactgcaatggcgccgtgctgagcgtggaggagctgctgatcggcggcgagatgatcaaagccggcaccctgacactggaggaggtgcggcgcaagttcaacaacggcgagatcaacttcagatcttga

SEQ ID NO: 71 - DNA, 1068 bp, synthetic construct
  source 1..1068: mol_type = other DNA; note = AAVS1-R-ZFN
atggactacaaagaccatgacggtgattataaagatcatgacatcgattacaaggatgacgatgacaagatggcccccaagaagaagaggaaggtgggcattcacggggtacccgccgctatggccgagcggcccttccagtgccggatctgcatgcggaactttagccagagcagcaacctggcccggcacatcagaacccacacaggcgagaagcccttcgcctgcgacatctgcggccggaagttcgcccggaccgactacctggtggaccacaccaagatccacaccggcagccagaaaccttttcagtgcagaatctgtatgagaaacttcagctacaacacccacctgaccagacacatccggacacacactggggagaaaccttttgcctgcgatatctgtgggagaaagtttgcccagggctacaatctggccgggcacacaaagattcacctgagaggatcccagctggtgaagagcgagctggaggagaagaagtccgagctgcggcacaagctgaagtacgtgccccacgagtacatcgagctgatcgagatcgccaggaacagcacccaggaccgcatcctggagatgaaggtgatggagttcttcatgaaggtgtacggctacaggggaaagcacctgggcggaagcagaaagcctgacggcgccatctatacagtgggcagccccatcgattacggcgtgatcgtggacacaaaggcctacagcggcggctacaatctgcctatcggccaggccgacgagatgcagagatacgtgaaggagaaccagacccggaataagcacatcaaccccaacgagtggtggaaggtgtaccctagcagcgtgaccgagttcaagttcctgttcgtgagcggccacttcaagggcaactacaaggcccagctgaccaggctgaaccgcaaaaccaactgcaatggcgccgtgctgagcgtggaggagctgctgatcggcggcgagatgatcaaagccggcaccctgacactggaggaggtgcggcgcaagttcaacaacggcgagatcaacttcagatcttga

SEQ ID NO: 72 - DNA, 8351 bp, synthetic construct
  source 1..8351: mol_type = other DNA; note = pUC_ROSA_n_CAG-rtTA
tcgcgcgtttcggtgatgacggtgaaaacctctgacacatgcagctcccggagacggtcacagcttgtctgtaagcggatgccgggagcagacaagcccgtcagggcgcgtcagcgggtgttggcgggtgtcggggctggcttaactatgcggcatcagagcagattgtactgagagtgcaccatatgcggtgtgaaataccgcacagatgcgtaaggagaaaataccgcatcaggcgccattcgccattcaggctgcgcaactgttgggaagggcgatcggtgcgggcctcttcgctattacgccagctggcgaaagggggatgtgctgcaaggcgattaagttgggtaacgccagggttttcccagtcacgacgttgtaaaacgacggccagtgaattggctcgaaaccggacggagccattgctctcgcagagggaggagcgcttccggctagcctcttgtcgccgattggccgtttctcctcccgccgtgtgtgaaaacacaaatggcgtattctggttggagtaaagctcctgtcagttacgccgtcgggagtacgcagccgcttagcgactctcgcgttgccccctgggtggggcgggtaggtaggtggggtgtagagatgctgggtgtgcgggcgcggccggcctcctgcggcgggaggggagggtcagtgaaatcggctctggcgcgggcgtcctcccaccctccccttccttcgggggagtcggtttacccgccgcctgcttgtcttcgacacctgattggctgtcgaagctgtgggaccgggcccttgctactggctcgagtctcacatgagcgaaaccactgcgcggggcgcgggggtggcggggaggcgggcgttggtacggtcctccccgaggccgagcgccgcagtgtctggccccgcgcccctgcgcaacgtggcaggaagcgcgcgctggaggcgggggcgggctgccggccgagacttctggatggcggcggccgcggctccgccccgggttcccaccgcctgaagggcgagacaagcccgacctgctacaggcactcgtgggggtgggggaggagcgggggtcggtccggctggtttgtgggtgggaggcgcttgttctccaaaaaccggcgcgagctgcaatcctgagggagctgcggtggaggaggtggagagaaggccgcacccttctgggcagggggaggggagtgccgcaatacctttatgggagttctctgctgcctcccgtcttgtaaggaccgccctgggcctggaagaagccctccctcctttcctcctcgcgtgatcggtacctagggcgcagtagtccagggtttccttgatgatgtcatacttatcctgtcccttttttttccacagctcgcggttgaggacaaactcttcgcggtctttccagtttcgaacgggagatctgccaccatgggatcggccattgaacaagatggattgcacgcaggttctccggccgcttgggtggagaggctattcggctatgactgggcacaacagacaatcggctgctctgatgccgccgtgttccggctgtcagcgcaggggcgcccggttctttttgtcaagaccgacctgtccggtgccctgaatgaactgcaggacgaggcagcgcggctatcgtggctggccacgacgggcgttccttgcgcagctgtgctcgacgttgtcactgaagcgggaagggactggctgctattgggcgaagtgccggggcaggatctcctgtcatctcaccttgctcctgccgagaaagtatccatcatggctgatgcaatgcggcggctgcatacgcttgatccggctacctgcccattcgaccaccaagcgaaacatcgcatcgagcgagcacgtactcggatggaagccggtcttgtcgatcaggatgatctggacgaagagcatcaggggctcgcgccagccgaactgttcgccaggctcaaggcgcgcatgcccgacggcgatgatctcgtcgtgacccatggcgatgcctgcttgccgaatatcatggtggaaaatggccgcttttctggattcatcgactgtggccggctgggtgtggcggaccgctatcaggacatagcgttggctacccgtgatattgctgaagagcttggcggcgaatgggctgaccgcttcctcgtgctttacggtatcgccgctcccgattcgcagcgcatcgccttctatcgccttcttgacgagttcttctgaggggatcaattctctagcgctgatcagcctcgactgtgccttctagttgccagccatctgttgtttgcccctcccccgtgccttccttgaccctggaaggtgccactcccactgtcctttcctaataaaatgaggaaattgcatcgcattgtctgagtaggtgtcattctattctggggggtggggtggggcaggacagcaagggggaggattgggaagacaatagcaggcatgctggggatgcggtgggctctatggcttctgaggcggaaagaaccagctggactagttattaatagtaatcaattacggggtcattagttcatagcccatatatggagttccgcgttacataacttacggtaaatggcccgcctggctgaccgcccaacgacccccgcccattgacgtcaataatgacgtatgttcccatagtaacgccaatagggactttccattgacgtcaatgggtggagtatttacggtaaactgcccacttggcagtacatcaagtgtatcatatgccaagtacgccccctattgacgtcaatgacggtaaatggcccgcctggcattatgcccagtacatgaccttatgggactttcctacttggcagtacatctacgtattagtcatcgctattaccatggtcgaggtgagccccacgttctgcttcactctccccatctcccccccctccccacccccaattttgtatttatttattttttaattattttgtgcagcgatgggggcggggggggggggggggcgcgcgccaggcggggcggggcggggcgaggggcggggcggggcgaggcggagaggtgcggcggcagccaatcagagcggcgcgctccgaaagtttccttttatggcgaggcggcggcggcggcggccctataaaaagcgaagcgcgcggcgggcggggagtcgctgcgacgctgccttcgccccgtgccccgctccgccgccgcctcgcgccgcccgccccggctctgactgaccgcgttactcccacaggtgagcgggcgggacggcccttctcctccgggctgtaattagcgcttggtttaatgacggcttgtttcttttctgtggctgcgtgaaagccttgaggggctccgggagggccctttgtgcggggggagcggctcggggggtgcgtgcgtgtgtgtgtgcgtggggagcgccgcgtgcggctccgcgctgcccggcggctgtgagcgctgcgggcgcggcgcggggctttgtgcgctccgcagtgtgcgcgaggggagcgcggccgggggcggtgccccgcggtgcggggggggctgcgaggggaacaaaggctgcgtgcggggtgtgtgcgtgggggggtgagcagggggtgtgggcgcgtcggtcgggctgcaaccccccctgcacccccctccccgagttgctgagcacggcccggcttcgggtgcggggctccgtacggggcgtggcgcggggctcgccgtgccgggcggggggtggcggcaggtgggggtgccgggcggggcggggccgcctcgggccggggagggctcgggggaggggcgcggcggcccccggagcgccggcggctgtcgaggcgcggcgagccgcagccattgccttttatggtaatcgtgcgagagggcgcagggacttcctttgtcccaaatctgtgcggagccgaaatctgggaggcgccgccgcaccccctctagcgggcgcggggcgaagcggtgcggcgccggcaggaaggaaatgggcggggagggccttcgtgcgtcgccgcgccgccgtccccttctccctctccagcctcggggctgtccgcggggggacggctgccttcgggggggacggggcagggcggggttcggcttctggcgtgtgaccggcggctctagagcctctgctaaccatgttcatgccttcttctttttcctacagctcctgggcaacgtgctggttattgtgctgtctcatcattttggcaaagaattaattcggatccaccatgtctagactggacaagagcaaagtcataaactctgctctggaattactcaatggagtcggtatcgaaggcctgacgacaaggaaactcgctcaaaagctgggagttgagcagcctaccctgtactggcacgtgaagaacaagcgggccctgctcgatgccctgccaatcgagatgctggacaggcatcatacccactcctgccccctggaaggcgagtcatggcaagactttctgcggaacaacgccaagtcataccgctgtgctctcctctcacatcgcgacggggctaaagtgcatctcggcacccgcccaacagagaaacagtacgaaaccctggaaaatcagctcgcgttcctgtgtcagcaaggcttctccctggagaacgcactgtacgctctgtccgccgtgggccactttacactgggctgcgtattggaggaacaggagcatcaagtagcaaaagaggaaagagagacacctaccaccgattctatgcccccacttctgaaacaagcaattgagctgttcgaccggcagggagccgaacctgccttccttttcggcctggaactaatcatatgtggcctggagaaacagctaaagtgcgaaagcggcgggccgaccgacgcccttgacgattttgacttagacatgctcccagccgatgcccttgacgactttgaccttgatatgctgcctgctgacgctcttgacgattttgaccttgacatgctccccgggtaaacgcgtagctcgctgatcagcctcgactgtgccttctagttgccagccatctgttgtttgcccctcccccgtgccttccttgaccctggaaggtgccactcccactgtcctttcctaataaaatgaggaaattgcatcgcattgtctgagtaggtgtcattctattctggggggtggggtggggcaggacagcaagggggaggattgggaagagaatagcaggcatgctgggggtcgacgcttctcgattatgggcgggattcttttgcctaggcttaaggggctaacttggtccctgggcgttgccctgcaggggagtgagcagctgtaagatttgaggggcgactccgattagtttatcttcccacggactagagttggtgtcgaggttattgtaataagggtggggtagggaaatggagcttagtcattcacctggggctgattttatgcaacgagactgcggattatcactacttatcatttttggagcatttttctagagacagacataaagcatgatcacctgagttttataccatttgagacccttgctgcaccaccaaagtgtagcatcaggttaaatcttaatagaaaaattttagcttttgcttgagaaaccagtgcttccctccctcaccctctctccccaggctctctacccctttgcatccctaccaggcatcttagcaactctcactcatacttgatcccattttccatttgttgtacttgctcctctagtattcagacatagcactagctttctccctctcttgatcttgggtagcctggtgtctcgcgaaaccagacagattggttccaccacaaattaaggcttgagctggggcttgactcttacccagcagtgcttttattcctccctagttcacgttcttaaatgtttatcttgattttcattttatcctttttccttagctgggattctgtccctgaccgtcttcacagtccaggtgatcttgactactgctttacagagaattggatctgaggttaggcaacatctccctttttcttcctctaaatacctctcatttctgttcttaccagttagtaactgatctcagatgcctgtgtgatagcttccaagcttggcgtaatcatggtcatagctgtttcctgtgtgaaattgttatccgctcacaattccacacaacatacgagccggaagcataaagtgtaaagcctggggtgcctaatgagtgagctaactcacattaattgcgttgcgctcactgcccgctttccagtcgggaaacctgtcgtgccagctgcattaatgaatcggccaacgcgcggggagaggcggtttgcgtattgggcgctcttccgcttcctcgctcactgactcgctgcgctcggtcgttcggctgcggcgagcggtatcagctcactcaaaggcggtaatacggttatccacagaatcaggggataacgcaggaaagaacatgtgagcaaaaggccagcaaaaggccaggaaccgtaaaaaggccgcgttgctggcgtttttccataggctccgcccccctgacgagcatcacaaaaatcgacgctcaagtcagaggtggcgaaacccgacaggactataaagataccaggcgtttccccctggaagctccctcgtgcgctctcctgttccgaccctgccgcttaccggatacctgtccgcctttctcccttcgggaagcgtggcgctttctcatagctcacgctgtaggtatctcagttcggtgtaggtcgttcgctccaagctgggctgtgtgcacgaaccccccgttcagcccgaccgctgcgccttatccggtaactatcgtcttgagtccaacccggtaagacacgacttatcgccactggcagcagccactggtaacaggattagcagagcgaggtatgtaggcggtgctacagagttcttgaagtggtggcctaactacggctacactagaagaacagtatttggtatctgcgctctgctgaagccagttaccttcggaaaaagagttggtagctcttgatccggcaaacaaaccaccgctggtagcggtggtttttttgtttgcaagcagcagattacgcgcagaaaaaaaggatctcaagaagatcctttgatcttttctacggggtctgacgctcagtggaacgaaaactcacgttaagggattttggtcatgagattatcaaaaaggatcttcacctagatccttttaaattaaaaatgaagttttaaatcaatctaaagtatatatgagtaaacttggtctgacagttaccaatgcttaatcagtgaggcacctatctcagcgatctgtctatttcgttcatccatagttgcctgactccccgtcgtgtagataactacgatacgggagggcttaccatctggccccagtgctgcaatgataccgcgagacccacgctcaccggctccagatttatcagcaataaaccagccagccggaagggccgagcgcagaagtggtcctgcaactttatccgcctccatccagtctattaattgttgccgggaagctagagtaagtagttcgccagttaatagtttgcgcaacgttgttgccattgctacaggcatcgtggtgtcacgctcgtcgtttggtatggcttcattcagctccggttcccaacgatcaaggcgagttacatgatcccccatgttgtgcaaaaaagcggttagctccttcggtcctccgatcgttgtcagaagtaagttggccgcagtgttatcactcatggttatggcagcactgcataattctcttactgtcatgccatccgtaagatgcttttctgtgactggtgagtactcaaccaagtcattctgagaatagtgtatgcggcgaccgagttgctcttgcccggcgtcaatacgggataataccgcgccacatagcagaactttaaaagtgctcatcattggaaaacgttcttcggggcgaaaactctcaaggatcttaccgctgttgagatccagttcgatgtaacccactcgtgcacccaactgatcttcagcatcttttactttcaccagcgtttctgggtgagcaaaaacaggaaggcaaaatgccgcaaaaaagggaataagggcgacacggaaatgttgaatactcatactcttcctttttcaatattattgaagcatttatcagggttattgtctcatgagcggatacatatttgaatgtatttagaaaaataaacaaataggggttccgcgcacatttccccgaaaagtgccacctgacgtctaagaaaccattattatcatgacattaacctataaaaataggcgtatcacgaggccctttcgtc

SEQ ID NO: 73 - DNA, 2477 bp, synthetic construct
  source 1..2477: mol_type = other DNA; note = vector CAG-rtTA
ctagttattaatagtaatcaattacggggtcattagttcatagcccatatatggagttccgcgttacataacttacggtaaatggcccgcctggctgaccgcccaacgacccccgcccattgacgtcaataatgacgtatgttcccatagtaacgccaatagggactttccattgacgtcaatgggtggagtatttacggtaaactgcccacttggcagtacatcaagtgtatcatatgccaagtacgccccctattgacgtcaatgacggtaaatggcccgcctggcattatgcccagtacatgaccttatgggactttcctacttggcagtacatctacgtattagtcatcgctattaccatggtcgaggtgagccccacgttctgcttcactctccccatctcccccccctccccacccccaattttgtatttatttattttttaattattttgtgcagcgatgggggcggggggggggggggggcgcgcgccaggcggggcggggcggggcgaggggcggggcggggcgaggcggagaggtgcggcggcagccaatcagagcggcgcgctccgaaagtttccttttatggcgaggcggcggcggcggcggccctataaaaagcgaagcgcgcggcgggcggggagtcgctgcgacgctgccttcgccccgtgccccgctccgccgccgcctcgcgccgcccgccccggctctgactgaccgcgttactcccacaggtgagcgggcgggacggcccttctcctccgggctgtaattagcgcttggtttaatgacggcttgtttcttttctgtggctgcgtgaaagccttgaggggctccgggagggccctttgtgcggggggagcggctcggggggtgcgtgcgtgtgtgtgtgcgtggggagcgccgcgtgcggctccgcgctgcccggcggctgtgagcgctgcgggcgcggcgcggggctttgtgcgctccgcagtgtgcgcgaggggagcgcggccgggggcggtgccccgcggtgcggggggggctgcgaggggaacaaaggctgcgtgcggggtgtgtgcgtgggggggtgagcagggggtgtgggcgcgtcggtcgggctgcaaccccccctgcacccccctccccgagttgctgagcacggcccggcttcgggtgcggggctccgtacggggcgtggcgcggggctcgccgtgccgggcggggggtggcggcaggtgggggtgccgggcggggcggggccgcctcgggccggggagggctcgggggaggggcgcggcggcccccggagcgccggcggctgtcgaggcgcggcgagccgcagccattgccttttatggtaatcgtgcgagagggcgcagggacttcctttgtcccaaatctgtgcggagccgaaatctgggaggcgccgccgcaccccctctagcgggcgcggggcgaagcggtgcggcgccggcaggaaggaaatgggcggggagggccttcgtgcgtcgccgcgccgccgtccccttctccctctccagcctcggggctgtccgcggggggacggctgccttcgggggggacggggcagggcggggttcggcttctggcgtgtgaccggcggctctagagcctctgctaaccatgttcatgccttcttctttttcctacagctcctgggcaacgtgctggttattgtgctgtctcatcattttggcaaagaattaattcggatccaccatgtctagactggacaagagcaaagtcataaactctgctctggaattactcaatggagtcggtatcgaaggcctgacgacaaggaaactcgctcaaaagctgggagttgagcagcctaccctgtactggcacgtgaagaacaagcgggccctgctcgatgccctgccaatcgagatgctggacaggcatcatacccactcctgccccctggaaggcgagtcatggcaagactttctgcggaacaacgccaagtcataccgctgtgctctcctctcacatcgcgacggggctaaagtgcatctcggcacccgcccaacagagaaacagtacgaaaccctggaaaatcagctcgcgttcctgtgtcagcaaggcttctccctggagaacgcactgtacgctctgtccgccgtgggccactttacactgggctgcgtattggaggaacaggagcatcaagtagcaaaagaggaaagagagacacctaccaccgattctatgcccccacttctgaaacaagcaattgagctgttcgaccggcagggagccgaacctgccttccttttcggcctggaactaatcatatgtggcctggagaaacagctaaagtgcgaaagcggcgggccgaccgacgcccttgacgattttgacttagacatgctcccagccgatgcccttgacgactttgaccttgatatgctgcctgctgacgctcttgacgattttgaccttgacatgctccccgggtaa

SEQ ID NO: 74 - DNA, 2154 bp, synthetic construct
  source 1..2154: mol_type = other DNA; note = PU.1-IRF8
atgttacaggcgtgcaaaatggaagggtttcccctcgtcccccctccatcagaagacctggtgccctatgacacggatctataccaacgccaaacgcacgagtattacccctatctcagcagtgatggggagagccatagcgaccattactgggacttccacccccaccacgtgcacagcgagttcgagagcttcgccgagaacaacttcacggagctccagagcgtgcagcccccgcagctgcagcagctctaccgccacatggagctggagcagatgcacgtcctcgatacccccatggtgccaccccatcccagtcttggccaccaggtctcctacctgccccggatgtgcctccagtacccatccctgtccccagcccagcccagctcagatgaggaggagggcgagcggcagagccccccactggaggtgtctgacggcgaggcggatggcctggagcccgggcctgggctcctgcctggggagacaggcagcaagaagaagatccgcctgtaccagttcctgttggacctgctccgcagcggcgacatgaaggacagcatctggtgggtggacaaggacaagggcaccttccagttctcgtccaagcacaaggaggcgctggcgcaccgctggggcatccagaagggcaaccgcaagaagatgacctaccagaagatggcgcgcgcgctgcgcaactacggcaagacgggcgaggtcaagaaggtgaagaagaagctcacctaccagttcagcggcgaagtgctgggccgcgggggcctggccgagcggcgccacccgccccacggatcgggagagggcaggggaagtcttctaacatgcggggacgtggaggaaaatcccggccccatgtgtgaccggaatggtggtcggcggcttcgacagtggctgatcgagcagattgacagtagcatgtatccaggactgatttgggagaatgaggagaagagcatgttccggatcccttggaaacacgctggcaagcaagattataatcaggaagtggatgcctccatttttaaggcctgggcagtttttaaagggaagtttaaagaaggggacaaagctgaaccagccacttggaagacgaggttacgctgtgctttgaataagagcccagattttgaggaagtgacggaccggtcccaactggacatttccgagccatacaaagtttaccgaattgttcctgaggaagagcaaaaatgcaaactaggcgtggcaactgctggctgcgtgaatgaagttacagagatggagtgcggtcgctctgaaatcgacgagctgatcaaggagccttctgtggacgattacatggggatgatcaaaaggagcccttccccgccggaggcctgtcggagtcagctccttccagactggtgggcgcagcagcccagcacaggcgtgccgctggtgacggggtacaccacctacgacgcgcaccattcagcattctcccagatggtgatcagcttctactatgggggcaagctggtgggccaggccaccaccacctgccccgagggctgccgcctgtccctgagccagcctgggctgcccggcaccaagctgtatgggcccgagggcctggagctggtgcgcttcccgccggccgacgccatccccagcgagcgacagaggcaggtgacgcggaagctgttcgggcacctggagcgcggggtgctgctgcacagcagccggcagggcgtgttcgtcaagcggctgtgccagggccgcgtgttctgcagcggcaacgccgtggtgtgcaaaggcaggcccaacaagctggagcgtgatgaggtggtccaggtcttcgacaccagccagttcttccgagagctgcagcagttctataacagccagggccggcttcctgacggcagggtggtgctgtgctttggggaagagtttccggatatggcccccttgcgctccaaactcattctcgtgcagattgagcagctgtatgtccggcaactggcagaagaggctgggaagagctgtggagccggctctgtgatgcaggcccccgaggagccgccgccagaccaggtcttccggatgtttccagatatttgtgcctcacaccagagatcatttttcagagaaaaccaacagatcaccgtctaa

SEQ ID NO: 75 - DNA, 2321 bp, synthetic construct
  source 1..2321: mol_type = other DNA; note = PU.1-RUNX1
atgttacaggcgtgcaaaatggaagggtttcccctcgtcccccctccatcagaagacctggtgccctatgacacggatctataccaacgccaaacgcacgagtattacccctatctcagcagtgatggggagagccatagcgaccattactgggacttccacccccaccacgtgcacagcgagttcgagagcttcgccgagaacaacttcacggagctccagagcgtgcagcccccgcagctgcagcagctctaccgccacatggagctggagcagatgcacgtcctcgatacccccatggtgccaccccatcccagtcttggccaccaggtctcctacctgccccggatgtgcctccagtacccatccctgtccccagcccagcccagctcagatgaggaggagggcgagcggcagagccccccactggaggtgtctgacggcgaggcggatggcctggagcccgggcctgggctcctgcctggggagacaggcagcaagaagaagatccgcctgtaccagttcctgttggacctgctccgcagcggcgacatgaaggacagcatctggtgggtggacaaggacaagggcaccttccagttctcgtccaagcacaaggaggcgctggcgcaccgctggggcatccagaagggcaaccgcaagaagatgacctaccagaagatggcgcgcgcgctgcgcaactacggcaagacgggcgaggtcaagaaggtgaagaagaagctcacctaccagttcagcggcgaagtgctgggccgcgggggcctggccgagcggcgccacccgccccacggatcgggagagggcaggggaagtcttctaacatgcggggacgtggaggaaaatcccggccccatggcttcagacagcatatttgagtcatttccttcgtacccacagtgcttcatgagagaatgcatacttggaatgaatccttctagagacgtccacgatgccagcacgagccgccgcttcacgccgccttccaccgcgctgagcccaggcaagatgagcgaggcgttgccgctgggcgccccggacgccggcgctgccctggccggcaagctgaggagcggcgaccgcagcatggtggaggtgctggccgaccacccgggcgagctggtgcgcaccgacagccccaacttcctctgctccgtgctgcctacgcactggcgctgcaacaagaccctgcccatcgctttcaaggtggtggccctaggggatgttccagatggcactctggtcactgtgatggctggcaatgatgaaaactactcggctgagctgagaaatgctaccgcagccatgaagaaccaggttgcaagatttaatgacctcaggtttgtcggtcgaagtggaagagggaaaagcttcactctgaccatcactgtcttcacaaacccaccgcaagtcgccacctaccacagagccatcaaaatcacagtggatgggccccgagaacctcgaagacatcggcagaaactagatgatcagaccaagcccgggagcttgtccttttccgagcggctcagtgaactggagcagctgcggcgcacagccatgagggtcagcccacaccacccagcccccacgcccaaccctcgtgcctccctgaaccactccactgcctttaaccctcagcctcagagtcagatgcaggatacaaggcagatccaaccatccccaccgtggtcctacgatcagtcctaccaatacctgggatccattgcctctccttctgtgcacccagcaacgcccatttcacctggacgtgccagcggcatgacaaccctctctgcagaactttccagtcgactctcaacggcacccgacctgacagcgttcagcgacccgcgccagttccccgcgctgccctccatctccgacccccgcatgcactatccaggcgccttcacctactccccgacgccggtcacctcgggcatcggcatcggcatgtcggccatgggctcggccacgcgctaccacacctacctgccgccgccctaccccggctcgtcgcaagcgcagggaggcccgttccaagccagctcgccctcctaccacctgtactacggcgcctcggccggctcctaccagttctccatggtgggcggcgagcgctcgccgccgcgcatcctgccgccctgcaccaacgcctccaccggctccgcgctgctcaaccccagcctcccgaaccagagcgacgtggtggaggccgagggcagccacagcaactccccgaccaacatggcgccctccgcgcgcctggaggaggccgtgtggaggccctacaccggttg

SEQ ID NO: 76 - DNA, 1911 bp, synthetic construct
  source 1..1911: mol_type = other DNA; note = PU.1-CEBPB
atgttacaggcgtgcaaaatggaagggtttcccctcgtcccccctccatcagaagacctggtgccctatgacacggatctataccaacgccaaacgcacgagtattacccctatctcagcagtgatggggagagccatagcgaccattactgggacttccacccccaccacgtgcacagcgagttcgagagcttcgccgagaacaacttcacggagctccagagcgtgcagcccccgcagctgcagcagctctaccgccacatggagctggagcagatgcacgtcctcgatacccccatggtgccaccccatcccagtcttggccaccaggtctcctacctgccccggatgtgcctccagtacccatccctgtccccagcccagcccagctcagatgaggaggagggcgagcggcagagccccccactggaggtgtctgacggcgaggcggatggcctggagcccgggcctgggctcctgcctggggagacaggcagcaagaagaagatccgcctgtaccagttcctgttggacctgctccgcagcggcgacatgaaggacagcatctggtgggtggacaaggacaagggcaccttccagttctcgtccaagcacaaggaggcgctggcgcaccgctggggcatccagaagggcaaccgcaagaagatgacctaccagaagatggcgcgcgcgctgcgcaactacggcaagacgggcgaggtcaagaaggtgaagaagaagctcacctaccagttcagcggcgaagtgctgggccgcgggggcctggccgagcggcgccacccgccccacggatcgggagagggcaggggaagtcttctaacatgcggggacgtggaggaaaatcccggccccatgcaacgcctggtggcctgggacccagcatgtctccccctgccgccgccgccgcctgcctttaaatccatggaagtggccaacttctactacgaggcggactgcttggctgctgcgtacggcggcaaggcggcccccgcggcgccccccgcggccagacccgggccgcgcccccccgccggcgagctgggcagcatcggcgaccacgagcgcgccatcgacttcagcccgtacctggagccgctgggcgcgccgcaggccccggcgcccgccacggccacggacaccttcgaggcggctccgcccgcgcccgcccccgcgcccgcctcctccgggcagcaccacgacttcctctccgacctcttctccgacgactacgggggcaagaactgcaagaagccggccgagtacggctacgtgagcctggggcgcctgggggccgccaagggcgcgctgcaccccggctgcttcgcgcccctgcacccaccgcccccgccgccgccgccgcccgccgagctcaaggcggagccgggcttcgagcccgcggactgcaagcggaaggaggaggccggggcgccgggcggcggcgcaggcatggcggcgggcttcccgtacgcgctgcgcgcttacctcggctaccaggcggtgccgagcggcagcagcgggagcctctccacgtcctcctcgtccagcccgcccggcacgccgagccccgctgacgccaaggcgcccccgaccgcctgctacgcgggggccgcgccggcgccctcgcaggtcaagagcaaggccaagaagaccgtggacaagcacagcgacgagtacaagatccggcgcgagcgcaacaacatcgccgtgcgcaagagccgcgacaaggccaagatgcgcaacctggagacgcagcacaaggtcctggagctcacggccgagaacgagcggctgcagaagaaggtggagcagctgtcgcgcgagctcagcaccctgcggaacttgttcaagcagctgcccgagcccctgctcgcctcctccggccactgctag

SEQ ID NO: 77 - DNA, 4848 bp, synthetic construct
  source 1..4848: mol_type = other DNA; note = PU.1-SALL1
atgttacaggcgtgcaaaatggaagggtttcccctcgtcccccctccatcagaagacctggtgccctatgacacggatctataccaacgccaaacgcacgagtattacccctatctcagcagtgatggggagagccatagcgaccattactgggacttccacccccaccacgtgcacagcgagttcgagagcttcgccgagaacaacttcacggagctccagagcgtgcagcccccgcagctgcagcagctctaccgccacatggagctggagcagatgcacgtcctcgatacccccatggtgccaccccatcccagtcttggccaccaggtctcctacctgccccggatgtgcctccagtacccatccctgtccccagcccagcccagctcagatgaggaggagggcgagcggcagagccccccactggaggtgtctgacggcgaggcggatggcctggagcccgggcctgggctcctgcctggggagacaggcagcaagaagaagatccgcctgtaccagttcctgttggacctgctccgcagcggcgacatgaaggacagcatctggtgggtggacaaggacaagggcaccttccagttctcgtccaagcacaaggaggcgctggcgcaccgctggggcatccagaagggcaaccgcaagaagatgacctaccagaagatggcgcgcgcgctgcgcaactacggcaagacgggcgaggtcaagaaggtgaagaagaagctcacctaccagttcagcggcgaagtgctgggccgcgggggcctggccgagcggcgccacccgccccacggatcgggagagggcaggggaagtcttctaacatgcggggacgtggaggaaaatcccggccccatgtcgcggaggaagcaagcgaagcctcaacatttccaatccgaccccgaagtggcctcgctcccccggcgagatggagacacagaaaagggtcaaccgagtcgccctactaagagcaaggatgcccacgtctgtggccggtgctgtgccgagttctttgaattatcagatcttctgctccacaagaagaactgtactaaaaatcaattagttttaatcgtaaatgaaaatccagcctccccacccgaaaccttctcccccagcccccctcctgataatcctgatgaacaaatgaatgacacagttaacaaaacagatcaagtggactgcagcgacctttcagaacacaacggacttgacagggaagagtccatggaggtggaggccccggttgctaacaaaagcggcagcggcacttccagcggcagccacagcagtaccgccccaagcagcagcagcagcagcagcagcagcagcggcggcggcggcagctcctccacaggtacctcagcgatcacaacctctctacctcaactcggggacctgacaacactgggcaacttctccgtaatcaacagcaacgtcatcatcgagaacctccagagcaccaaggtggcggtggcccagttctcccaggaagcgaggtgcggcggggcctctgggggcaagctggccgtcccagccctcatggaacaactcctagctctgcagcagcagcagatccaccagctgcaattgatcgaacagattcgtcaccaaatattgctgttggcttctcagaatgcagacttgccaacatcttctagtccttctcaaggtactttacgaacatctgccaaccccttgtccacgctaagttcccatttatctcagcagctggcagcagcagctggattggcacagagcctcgccagccaatctgccagcattagtggtgtgaaacagctacccccaatccagctacctcagagcagttctggcaacaccatcattccatccaacagcggctcttctcccaatatgaacatattggcagcggcagttaccaccccgtcctctgaaaaagtggcttcaagtgctggggcctcccatgtcagcaacccagcggtctcatcatcgtcctcaccagcttttgcaataagcagtttattaagtcctgcgtctaatccacttctacctcagcaagcctccgctaactcggttttccccagccctttgcccaacatcggaacaactgcagaggatttaaactccttgtctgccttggcccagcaaagaaaaagcaagccaccaaatgtcactgcctttgaagcgaaaagtacttccgatgaggcattcttcaaacacaagtgcaggttctgcgcgaaggtctttgggagtgacagtgccttgcagatccacttgcgttcccataccggagagaggccattcaagtgcaacatctgcgggaacaggttctccaccaaggggaatctgaaagtccactttcagcgccacaaagagaaataccctcatatccagatgaacccctatcctgtgcctgagcatttggacaatatccccacgagtactggcatcccatatggcatgtccatccctccagagaagccagtcaccagctggctagacaccaaaccagtcctgcctactctgaccacttcagtcggcctgccgttgcccccaaccctcccaagcctcatacccttcatcaagacggaagagccagcccccatccccatcagccattctgccaccagccccccaggctcagtcaaaagtgactccgggggccctgagtcagccacaagaaacctaggtgggctcccagaggaagccgaagggtccactctgccaccctctggtggcaaaagcgaagagagtggcatggtcaccaactcagtcccgacggcgagcagtagcgtcctgagctccccagcggcagactgcggccccgcgggcagtgccaccaccttcaccaaccctttgttgccgctcatgtccgagcagttcaaggccaagtttccttttgggggactcctggactcagctcaggcatcagagacgtccaagcttcagcaactggtagaaaacattgacaagaaggccactgaccccaatgagtgcatcatctgccaccgggttctcagctgccagagcgccttgaaaatgcactacaggacacacactggggagaggccctttaagtgtaagatctgtggccgggctttcaccacgaaagggaatcttaaaacccactacagtgtccatcgtgctatgcccccgctcagagtccagcattcctgccccatctgccagaagaagttcacgaacgctgtggtcctgcagcagcacatccgaatgcatatgggaggccagatccccaacaccccagtccccgacagctactctgagtccatggagtctgacacaggttcctttgatgagaaaaattttgatgacctagacaacttctctgatgaaaacatggaagactgtcctgagggcagcatccctgatacacctaagtctgcagacgcctcccaagacagcttatcctcttcgcctttgcccctcgagatgtcgagcatcgctgctttggaaaatcagatgaagatgatcaatgctggcctggcagagcagctacaggccagcctgaagtcagtggagaatgggtccatcgagggggatgtcctgaccaatgattcatcctcagtgggtggtgacatggaaagccaaagtgctggcagcccagccatctcagagtctacctcttccatgcaggctctgtccccgtccaacagcacgcaggagttccacaagtcacccagcattgaggagaaaccacagagagcggtcccaagcgagtttgccaatggtttgtctcccaccccagtgaatggtggggctttggatttgacatctagtcacgcagagaaaatcatcaaagaagattctttggggatcctcttcccttttagagaccggggtaaatttaaaaacactgcttgtgacatttgtggcaaaacatttgcttgtcagagtgccttggacattcactatagaagtcataccaaagagagaccatttatttgcacagtttgcaatcgtggcttttccacaaagggtaatttgaagcagcacatgttgacacatcagatgcgagatctgccatcccagctctttgagcccagttccaaccttggccccaatcagaactcagcggtgattcccgccaactcgttgtcatctctcatcaagacagaggtcaacggcttcgtgcatgtttctcctcaggacagtaaggacacccccaccagtcacgtcccgtctgggcctctgtcttcctctgccacatccccagttctgctccctgctctgcccaggagaactcccaagcagcactactgcaacacatgtggcaaaaccttctcctcatcgagtgccctgcagattcacgagagaactcacactggagagaaaccctttgcttgcactatttgtggaagagctttcacgactaaaggcaatcttaaggtacacatgggcactcacatgtggaatagcacccctgcacgacggggtcggcggctctctgtggatggccccatgacatttctaggaggcaatcccgtcaagttcccagaaatgttccagaaggatttggcggcaagatcaggaagtggggatccttccagcttctggaatcagtatgcagcagcgctctccaacgggctggcgatgaaggccaacgagatctccgtcattcagaacggtggcatccctccaattcctggaagcctcggcagtgggaacagctcacctgttagtgggctgacgggaaacctggagaggctccagaactcagagcccaatgctcccctggccggcctggagaaaatggcaagcagtgagaacggaaccaacttccgcttcacccgcttcgtggaggacagcaaggagatcgtcacgagttaa

SEQ ID NO: 78 - DNA, 1083 bp, synthetic construct
  source 1..1083: mol_type = other DNA; note = Oct4 CDS
atggcgggacacctggcttcggatttcgccttctcgccccctccaggtggtggaggtgatgggccaggggggccggagccgggctgggttgatcctcggacctggctaagcttccaaggccctcctggagggccaggaatcgggccgggggttgggccaggctctgaggtgtgggggattcccccatgccccccgccgtatgagttctgtggggggatggcgtactgtgggccccaggttggagtggggctagtgccccaaggcggcttggagacctctcagcctgagggcgaagcaggagtcggggtggagagcaactccgatggggcctccccggagccctgcaccgtcacccctggtgccgtgaagctggagaaggagaagctggagcaaaacccggaggagtcccaggacatcaaagctctgcagaaagaactcgagcaatttgccaagctcctgaagcagaagaggatcaccctgggatatacacaggccgatgtggggctcaccctgggggttctatttgggaaggtattcagccaaacgaccatctgccgctttgaggctctgcagcttagcttcaagaacatgtgtaagctgcggcccttgctgcagaagtgggtggaggaagctgacaacaatgaaaatcttcaggagatatgcaaagcagaaaccctcgtgcaggcccgaaagagaaagcgaaccagtatcgagaaccgagtgagaggcaacctggagaatttgttcctgcagtgcccgaaacccacactgcagcagatcagccacatcgcccagcagcttgggctcgagaaggatgtggtccgagtgtggttctgtaaccggcgccagaagggcaagcgatcaagcagcgactatgcacaacgagaggattttgaggctgctgggtctcctttctcagggggaccagtgtcctttcctctggccccagggccccattttggtaccccaggctatgggagccctcacttcactgcactgtactcctcggtccctttccctgagggggaagcctttccccctgtctccgtcaccactctgggctctcccatgcattcaaactga

SEQ ID NO: 79 - DNA, 918 bp, synthetic construct
  source 1..918: mol_type = other DNA; note = Nanog CDS
atgagtgtggatccagcttgtccccaaagcttgccttgctttgaagcatccgactgtaaagaatcttcacctatgcctgtgatttgtgggcctgaagaaaactatccatccttgcaaatgtcttctgctgagatgcctcacacggagactgtctctcctcttccttcctccatggatctgcttattcaggacagccctgattcttccaccagtcccaaaggcaaacaacccacttctgcagagaagagtgtcgcaaaaaaggaagacaaggtcccggtcaagaaacagaagaccagaactgtgttctcttccacccagctgtgtgtactcaatgatagatttcagagacagaaatacctcagcctccagcagatgcaagaactctccaacatcctgaacctcagctacaaacaggtgaagacctggttccagaaccagagaatgaaatctaagaggtggcagaaaaacaactggccgaagaatagcaatggtgtgacgcagaaggcctcagcacctacctaccccagcctttactcttcctaccaccagggatgcctggtgaacccgactgggaaccttccaatgtggagcaaccagacctggaacaattcaacctggagcaaccagacccagaacatccagtcctggagcaaccactcctggaacactcagacctggtgcacccaatcctggaacaatcaggcctggaacagtcccttctataactgtggagaggaatctctgcagtcctgcatgcagttccagccaaattctcctgccagtgacttggaggctgccttggaagctgctggggaaggccttaatgtaatacagcagaccactaggtattttagtactccacaaaccatggatttattcctaaactactccatgaacatgcaacctgaagacgtgtga

SEQ ID NO: 80 - DNA, 20 bp, synthetic construct
  source 1..20: mol_type = other DNA; note = SPI1 total forward primer
ccccctccatcagaagacct

SEQ ID NO: 81 - DNA, 20 bp, synthetic construct
  source 1..20: mol_type = other DNA; note = SPI1 total reverse primer
aagtcccagtaatggtcgct

SEQ ID NO: 82 - DNA, 20 bp, synthetic construct
  source 1..20: mol_type = other DNA; note = SPI1 endo forward primer
cctgcaatgtcaagggaggg

SEQ ID NO: 83 - DNA, 19 bp, synthetic construct
  source 1..19: mol_type = other DNA; note = SPI1 endo reverse primer
ccaatgcagagcccctcag

SEQ ID NO: 84 - DNA, 20 bp, synthetic construct
  source 1..20: mol_type = other DNA; note = CEBPB total forward primer
gacgagtacaagatccggcg

SEQ ID NO: 85 - DNA, 20 bp, synthetic construct
  source 1..20: mol_type = other DNA; note = CEBPB total reverse primer
acagctgctccaccttcttc

SEQ ID NO: 86 - DNA, 20 bp, synthetic construct
  source 1..20: mol_type = other DNA; note = CEBPB endo forward primer
gggagcccgtcggtaatttt

SEQ ID NO: 87 - DNA, 20 bp, synthetic construct
  source 1..20: mol_type = other DNA; note = CEBPB endo reverse primer
catgtgcggttggtttggac
